(19) United States
(12) Patent Application Publication
(10) Pub. No.: US 2008/0318852 A1
(43) Pub. Date: Dec. 25, 2008

(54) Epitopes Related to Coeliac Disease

(76) Inventors: Robert Anderson, Victoria (AU); Tim Beissbath, Heidelberg (DE); Jason Tye-Din, Victoria (AU)

Correspondence Address: Pepper Hamilton LLP, 400 Berwyn Park, 899 Cassatt Road, Berwyn, PA, 19312-1183, US

(21) Appl. No.: 11/568,428

(22) PCT Filed: Apr. 28, 2005
(86) PCT No.: PCT/GB05/01621

§ 371 Date: Jul. 9, 2008

(30) Foreign Application Priority Data
Apr. 28, 2004 (AU) 2004201774
Feb. 11, 2005 (AU) 2005900650

(51) Int. Cl. A61K 38/00; C07K 14/00; C12N 15/11; C12N 15/00; C12N 5/06; C12N 1/20; C12N 5/04; C12P 21/04; A61P 1/00

(52) U.S. Cl. 514/12; 530/324; 536/23.1; 435/320.1; 435/325; 435/252.3; 435/419; 435/412; 435/69.1

(57) ABSTRACT

The invention herein disclosed is related to epitopes useful in methods of diagnosing, treating, and preventing coeliac disease. Therapeutic compositions which comprise at least one epitope are provided.

[0001] The invention relates to epitopes useful in the diagnosis and therapy of coeliac disease, including diagnostics, therapeutics, kits, and methods of using the foregoing.

[0002] Coeliac disease is caused by an immune mediated hypersensitivity to dietary gluten. Gluten proteins in wheat, rye, barley and in some cases oats are toxic in coeliac disease. Gluten is composed of alpha/beta, gamma and omega gliadins, and low and high molecular weight (LMW and HMW) glutenins in wheat, hordeins in barley, secalins in rye and avenins in oats. Hordeins and secalins are homologous to gamma and omega gliadins and low and high molecular weight glutenins in wheat. Avenins are phylogenetically more distant than hordeins and secalins from wheat gluten.

[0003] The goal of research in coeliac disease has been to define the toxic components of gluten by defining the peptides that stimulate gluten-specific T-cells. Precise definition of gluten epitopes permits development of new diagnostics, therapeutics, tests for gluten contamination in food and non-toxic grains that retain the cooking/baking qualities of traditional gluten. Many of these applications require a comprehensive understanding of all rather than the most common toxic peptides in gluten.

[0004] Genes encoding HLA-DQ2 and/or HLA-DQ8 are present in over 99% of individuals with coeliac disease compared to approximately 35% of the general Caucasian population. Gluten-derived peptides (epitopes) bound to HLA-DQ2 or HLA-DQ8 stimulate specific T-cells. HLA-DQ2 and DQ8-restricted epitopes include a “core” 9 amino acid sequence that directly interacts with the peptide binding groove of HLA-DQ2 or DQ8 and with cognate T-cell receptors. In general, libraries of overlapping peptides (usually 15 to 20mers) containing all unique 10 or 12mer peptides in an antigen have been used to map HLA class II-restricted T-cells epitopes.

[0005] A series of gluten peptides are known to activate gluten specific T-cells in coeliac disease. Previous studies have identified gluten peptides from selected gluten proteins or gluten digests. T-cell clones and lines isolated from intestinal biopsies have been used to screen these gluten components.

[0006] Modification of gluten by the enzyme, tissue transglutaminase (tTG) present in intestinal tissue, substantially increases gluten's stimulatory capacity on gluten specific T-cells. Most of the known epitopes for gluten-specific T-cells correspond to tTG-deamidated gluten peptides. Transglutaminase mediates deamidation of specific glutamine residues (to glutamate) in gluten. Glutamine-containing sequences susceptible to deamidation by tTG generally conform to a motif: QXPX or QXX (FYMILVW) (see Vader W. et al 2002 J. Exp. Med. 195:643-649, PCT WO 03/066079, and Fleckenstein B. 2002. J Biol Chem 277:34109-16). The motif for peptides that bind to HLA-DQ2 and that are susceptible to deamidation by tTG has been used to predict certain gluten epitopes (Vader et al J Exp Med 2002 J. Exp. Med. 195:643-649, PCT WO 03/066079).

[0007] However, other groups have identified epitopes for gluten-specific intestinal T-cell clones and lines using panels of eleven recombinant alpha/beta (11) and five gamma gliadins (Arentz-Hansen H. 2000. J. Exp. Med. 191:603-612, Arentz-Hansen H. 2002. Gastroenterology 123:803-809, PCT WO 02/083722), and lysates of purified gluten proteins (Sjostrom H. et al 1998. Scand. J. Immunol. 48,111-115; van de Wal, Y. et al 1998. J. Immunol. 161(4):1585-1588; van de Wal, Y. et al 1999. Eur. J. Immunol. 29:3133-3139; Vader W. et al 2002. Gastroenterology 122:1729-1737.).

[0008] Our work has exploited the observation that gluten challenge in vivo induces HLA-DQ2 restricted CD4+ gluten-specific T-cells in peripheral blood expressing a gut-homing integrin (alpha4beta7). This technique allowed the mapping of the dominant epitope in A-gliadin (57-73 QE65) (Anderson, R P et al 2000. Nat. Med. 6:337-342, WO 01/25793). A-gliadin 57-73 QE65 corresponds to two overlapping epitopes identified using intestinal T-cell clones (Arentz-Hansen H. et al 2000. J. Exp. Med. 191:603-612, Arentz-Hansen H. et al 2002. Gastroenterology 123:803-809). The advantage of in vivo gluten challenge to induce gluten specific T-cells is that any food can be consumed and the resulting T-cells induced in blood (quantified in peripheral blood using a simple overnight interferon gamma ELISPOT assay) will have been stimulated in vivo by endogenously presented epitopes, rather than primed in vitro by a synthetic or purified antigen. Overnight assays of fresh polyclonal peripheral blood T-cells also avoid the potential for artefacts associated with the lengthy purification of T-cell clones.

[0009] Interestingly, T-cell clones and lines specific for several gamma-gliadin epitopes (Arentz-Hansen H. 2002. Gastroenterology 123:803-809, PCT WO 02/083722) cross-react with the originally defined A-gliadin epitope 57-73 QE65.

[0010] Although there is substantial homology within the alpha/beta gliadins, earlier work (see WO 03/104273) has shown that the dominant epitope recognized in HLA-DQ2-associated coeliac disease, “A-gliadin 57-73 QE65”, is encoded by a minority of the alpha/beta gliadins present in Genbank.

### SUMMARY OF THE INVENTION

[0011] The current study set out to develop a method that would allow mapping of all T-cell epitopes in gluten. Consumption of wheat bread (200 g daily for 3 days) or oats (100 g daily for 3 days) was used to induce gluten or avenin-specific T-cells in peripheral blood (collected 6 days after beginning the challenge). Peripheral blood mononuclear cells (PBMC) were assessed in overnight interferon gamma ELISPOT assays using a library of gluten and avenin peptides including all unique 12mer sequences included in every Genbank entry for wheat gluten and/or oat avenins. This goal was achieved by establishing an algorithm to design peptides spanning all potential epitopes in gluten proteins in Genbank (2922 20mers included all 14 964 unique 9mers—potential T-cell epitopes), adapting the interferon-gamma ELISPOT assay to a high throughput assay capable of screening over 1000 peptides with a single individual's blood and developing bioinformatics tools to analyse and interpret the data generated.

[0012] A series of 41 “superfamilies” of wheat gluten peptides were identified as putative T-cell epitopes. Superfamilies shared motifs in which a limited level of redundancy was allowed. Many of the most potent families include known T-cell epitopes including the previously described dominant epitope, A-gliadin 57-73.

[0013] Through comprehensive mapping of gluten epitopes using PBMC after gluten challenge, the inventors have found a series of novel gliadin, LMW and HMW glutenin, and avenin epitopes for coeliac disease associated with HLA-DQ2 and HLA-DQ8. Novel epitopes were identified for HLA-DQ2 and HLA-DQ8-associated coeliac disease. HLA-DQ2 and HLA-DQ8 associated coeliac disease are genetically and functionally distinct in terms of the range of T-cell epitopes that are recognized. In addition, three peptides present in avenin proteins of oats also activated peripheral blood mononuclear cells (PBMC) following oats challenge in HLA-DQ2+ coeliac subjects, the first time oats epitopes have been defined. Identification of avenin peptides recognized by T-cells following oats challenge in vivo provides a molecular basis for the observed occasional relapse of coeliacs following oat exposure (Lundin KEA et al. 2003 Gut 52:1649-52) and may provide a basis for a predictive diagnostic or genetic de-toxification of oats.

[0014] The data presented here will provide a comprehensive basis for definition of both common “dominant” and occasional “weak” T-cell epitopes in coeliac disease. This information is the platform for functional applications such as diagnostics, food tests, immunotherapeutics and prophylactics, and for design of non-toxic gluten proteins useful in modified grains.

[0015] In particular, through comprehensive mapping of gluten T cell epitopes, the inventors have found epitopes bioactive in coeliac disease in HLA-DQ2+ patients in wheat gliadins and glutenins, having similar core sequences (e.g., SEQ ID NOS: 1-199) and similar extended sequences (e.g., SEQ ID NOS:200-1554, 1555-1655, 1656-1671, and 1830-1903). The inventors have also found epitopes bioactive in coeliac disease in HLA-DQ2+patients in: oat avenins having similar core sequences (e.g., SEQ ID NOS: 1684-1695) and similar extended sequences (e.g., SEQ ID NO: 1672-1683, 1696-1698, and 1764-1768); rye secalins (SEQ ID NOS: 1769-1786); and barley hordeins (SEQ ID NOS: 1787-1829). Additionally, epitopes bioactive in coeliac disease in HLA-DQ8+patients have been identified in wheat gliadins having similar core sequences (e.g., SEQ ID NOS: 1699-1721) and similar extended sequences (e.g., SEQ ID NOS: 1722-1763 and 1908-1927). This comprehensive mapping thus provides dominant epitopes recognized by T cells in coeliac patients. Thus, the methods of the invention described herein may be performed using any of these identified epitopes, and analogues and equivalents thereof. That is, the agents of the invention include these epitopes. Additionally, combinations of epitopes, i.e., “combitopes” or single peptides comprising two or more epitiopes, have been shown to induce equivalent responses as the individual epitopes, indicating that several epitopes may be utilized for therapeutic, diagnostic, and other uses of the invention. Such combitopes may be in the form of, e.g., SEQ ID NO: 1906. Preferably, the agents of the invention include one or more of the epitopes having the sequences listed recited in SEQ ID NOS: 1578-1579, 1582-1583, 1587-1593, 1600-1620, 1623-1655, 1656-1671, 1672-1698, 1699-1763, 1764-1768, 1769-1786, 1787-1829, 1895-1903, 1906, and 1908-1927 and analogues and equivalents thereof as defined herein.

[0016] Preferred agents that are bioactive in coeliac disease in HLA-DQ8+ patients possess a glutamine in a sequence that suggests susceptibility to deamidation separated by seven residues from a second glutamine also susceptible to deamidation (e.g., as found in QGSFQPSQQ) wherein the deamidated sequences are high affinity binders for HLA-DQ8 following deamidation by tTG (The binding motif for HLA-DQ8 favours glutamate at positions 1 and 9.) In a less preferred embodiment, the agent possesses glutamine residues susceptible to deamidation but not separated by seven residues from a second glutamine susceptible to tTG-mediated deamidation.

[0017] The invention thus provides a method of diagnosing coeliac disease, or susceptibility to coeliac disease, in an individual, comprising the steps of: (a) contacting a sample from the host with an agent selected from (i) the epitope comprising an amino acid sequence selected from SEQ ID NOS: 1-1927, preferably selected from SEQ ID NOS: 1578-1579, 1582-1583, 1587-1593, 1600-1620, 1623-1655, 1656-1671, 1672-1698, 1699-1763, 1764-1768, 1769-1786, 1787-1829, 1895-1903, 1906, and 1908-1927, or an equivalent sequence from a naturally occurring gluten protein, (ii) an analogue of (i) which is capable of being recognised by a T cell receptor that recognises (i), which in the case of a peptide analogue is not more than 50 amino acids in length, or (iii) a product comprising two or more agents as defined in (i) or (ii); and (b) determining in vitro whether T cells in the sample recognise the agent, with recognition by the T cells indicating that the individual has, or is susceptible to, coeliac disease.

[0018] The term “gluten protein” encompasses alpha/beta, gamma and omega gliadins, and low and high molecular weight (LMW and HMW) glutenins in wheat, hordeins in barley, secalins in rye, and avenins in oats. The invention is particularly concerned with gliadins and avenins.

[0019] The invention also provides use of the agent for the preparation of a diagnostic means for use in a method of diagnosing coeliac disease, or susceptibility to coeliac disease, in an individual, said method comprising determining whether T cells of the individual recognise the agent, recognition by the T cells indicating that the individual has, or is susceptible to, coeliac disease.

[0020] The finding of epitopes which are modified by transglutaminase also allows diagnosis of coeliac disease based on determining whether other types of immune response to these epitopes are present. Thus the invention also provides a method of diagnosing coeliac disease, or susceptibility to coeliac disease, in an individual comprising determining the presence of an antibody that binds to the epitope in a sample from the individual, the presence of the antibody indicating that the individual has, or is susceptible to, coeliac disease.

[0021] The invention provides a method of determining whether a composition is capable of causing coeliac disease comprising determining whether a protein capable of being modified by a transglutaminase to an oligopeptide sequence as defined above is present in the composition, the presence of the protein indicating that the composition is capable of causing coeliac disease.

[0022] The invention also provides a mutant gluten protein whose wild-type sequence can be modified by a transglutaminase to a sequence that comprises an epitope comprising sequence as defined above, but which mutant gluten protein has been modified in such a way that it does not contain sequence which can be modified by a transglutaminase to a sequence that comprises such an epitope comprising sequence; or a fragment of such a mutant gluten protein which is at least 7 amino acids long (e.g., at least 7, 8, 9, 10, 11, 12, 13, 14 or 15 amino acids long) and which comprises sequence which has been modified in said way.

[0023] The invention also provides a protein that comprises a sequence which is able to bind to a T cell receptor, which T cell receptor recognises the agent, and which sequence is able to cause antagonism of a T cell that carries such a T cell receptor.

[0024] Additionally the invention provides a food that comprises the proteins defined above.

[0025] The invention additionally provides the agent, optionally in association with a carrier, for use in a method of treating or preventing coeliac disease by tolerising T cells which recognise the agent. Also provided is an antagonist of a T cell which has a T cell receptor that recognises (i), optionally in association with a carrier, for use in a method of treating or preventing coeliac disease by antagonising such T cells. Additionally provided is the agent or an analogue that binds an antibody (that binds the agent) for use in a method of treating or preventing coeliac disease in an individual by tolerising the individual to prevent the production of such an antibody.

[0026] The invention also provides methods of preventing or treating coeliac disease comprising administering to an individual at least one agent selected from: a) a peptide comprising at least one epitope comprising a sequence selected from the group consisting of SEQ ID NOs: 1-1927, preferably from the group consisting of SEQ ID NOS: 1578-1579, 1582-1583, 1587-1593, 1600-1620, 1623-1655, 1656-1671, 1672-1698, 1699-1763, 1764-1768, 1769-1786, 1787-1829, 1895-1903, 1906, and 1908-1927, and equivalents thereof; and b) an analogue of a) which is capable of being recognised by a T cell receptor that recognises the peptide of a) and which is not more than 50 amino acids in length. In some embodiments, the agent is HLA-DQ2-restricted, HLA-DQ8-restricted or one agent is HLA-DQ2-restricted and a second agent is HLA-DQ8-restricted. In some embodiments, the agent comprises a wheat epitope, an oat epitope, a rye epitope, a barley epitope or any combination thereof either as a single agent or as multiple agents.

[0027] The present invention also provides methods of preventing or treating coeliac disease comprising administering to an individual a pharmaceutical composition comprising an agent as described above and pharmaceutically acceptable carrier or diluent.

[0028] The present invention also provides methods of preventing or treating coeliac disease comprising administering to an individual a pharmaceutical composition comprising an antagonist of a T cell which has a T cell receptor as defined above, and a pharmaceutically acceptable carrier or diluent.

[0029] The present invention also provides methods of preventing or treating coeliac disease comprising administering to an individual a composition for tolerising an individual to a gluten protein to suppress the production of a T cell or antibody response to an agent as defined above, which composition comprises an agent as defined above.

[0030] The present invention also provides methods of preventing or treating coeliac disease by 1) diagnosing coeliac disease in an individual by either: a) contacting a sample from the host with at least one agent selected from: i) a peptide comprising at least one epitope comprising a sequence selected from the group consisting of: SEQ ID NOS: 1-1927, preferably selected from the group consisting of SEQ ID NOS: 1578-1579, 1582-1583, 1587-1593, 1600-1620, 1623-1655, 1656-1671, 1672-1698, 1699-1763, 1764-1768, 1769-1786, 1787-1829, 1895-1903, 1906, and 1908-1927, and equivalents thereof; and ii) an analogue of i) which is capable of being recognised by a T cell receptor that recognises i) and which is not more than 50 amino acids in length; and determining in vitro whether T cells in the sample recognise the agent; recognition by the T cells indicating that the individual has, or is susceptible to, coeliac disease; or b) administering an agent as defined above and determining in vivo whether T cells in the individual recognise the agent, recognition of the agent indicating that the individual has or is susceptible to coeliac disease; and 2) administering to an individual diagnosed as having, or being susceptible to, coeliac disease a therapeutic agent for preventing or treating coeliac disease.

[0031] The present invention also provides agents as defined above, optionally in association with a carrier, for use in a method of treating or preventing coeliac disease by tolerising T cells which recognise the agent.

[0032] The present invention also provides antagonists of a T cell which has a T cell receptor as defined above, optionally in association with a carrier, for use in a method of treating or preventing coeliac disease by antagonising such T cells.

[0033] The present invention also provides proteins that comprises a sequence which is able to bind to a T cell receptor, which T cell receptor recognises an agent as defined above, and which sequence is able to cause antagonism of a T cell that carries such a T cell receptor.

[0034] The present invention also provides pharmaceutical compositions comprising an agent or antagonist as defined and a pharmaceutically acceptable carrier or diluent.

[0035] The present invention also provides compositions for tolerising an individual to a gluten protein to suppress the production of a T cell or antibody response to an agent as defined above, which composition comprises an agent as defined above.

[0036] The present invention also provides compositions for antagonising a T cell response to an agent as defined above, which composition comprises an antagonist as defined above.

[0037] The present invention also provides mutant gluten proteins whose wild-type sequence can be modified by a transglutaminase to a sequence which is an agent as defined above, which mutant gluten protein comprises a mutation which prevents its modification by a transglutaminase to a sequence which is an agent as defined above; or a fragment of such a mutant gluten protein which is at least 7 amino acids long (e.g., at least 7, 8, 9, 10, 11, 12, 13, 14 or 15 amino acids long) and which comprises the mutation.

[0038] The present invention also provides polynucleotides that comprise a coding sequence that encodes a protein or fragment as defined above.

[0039] The present invention also provides cells comprising a polynucleotide as defined above or which have been transformed with such a polynucleotide.

[0040] The present invention also provides mammals that expresses a T cell receptor as defined above.

[0041] The present invention also provides methods of diagnosing coeliac disease, or susceptibility to coeliac disease, in an individual comprising: a) contacting a sample from the host with at least one agent selected from i) a peptide comprising at least one epitope comprising a sequence selected from the group consisting of: SEQ ID NOS: 1-1927, preferably selected from the group consisting of SEQ ID NOS: SEQ ID NOS: 1578-1579, 1582-1583, 1587-1593, 1600-1620, 1623-1655, 1656-1671, 1672-1698, 1699-1763, 1764-1768, 1769-1786, 1787-1829, 1895-1903, 1906, and 1908-1927, and equivalents thereof; and ii) an analogue of i) which is capable of being recognised by a T cell receptor that recognises i) and which is not more than 50 amino acids in length; and b) determining in vitro whether T cells in the sample recognise the agent; recognition by the T cells indicating that the individual has, or is susceptible to, coeliac disease.

[0042] The present invention also provides methods of determining whether a composition is capable of causing coeliac disease comprising determining whether a protein capable of being modified by a transglutaminase to an oligopeptide sequence is present in the composition, the presence of the protein indicating that the composition is capable of causing coeliac disease.

[0043] The present invention also provides methods of identifying an antagonist of a T cell, which T cell recognises an agent as defined above, comprising contacting a candidate substance with the T cell and detecting whether the substance causes a decrease in the ability of the T cell to undergo an antigen specific response, the detecting of any such decrease in said ability indicating that the substance is an antagonist.

[0044] The present invention also provides kits for carrying out any of the methods described above comprising an agent as defined above and a means to detect the recognition of the peptide by the T cell.

[0045] The present invention also provides methods of identifying a product which is therapeutic for coeliac disease comprising administering a candidate substance to a mammal as defined above which has, or which is susceptible to, coeliac disease and determining whether substance prevents or treats coeliac disease in the mammal, the prevention or treatment of coeliac disease indicating that the substance is a therapeutic product.

[0046] The present invention also provides processes for the production of a protein encoded by a coding sequence as defined above which process comprises: a) cultivating a cell described above under conditions that allow the expression of the protein; and optionally b) recovering the expressed protein.

[0047] The present invention also provides methods of obtaining a transgenic plant cell comprising transforming a plant cell with a vector as described above to give a transgenic plant cell.

[0048] The present invention also provides methods of obtaining a first-generation transgenic plant comprising regenerating a transgenic plant cell transformed with a vector as described above to give a transgenic plant.

[0049] The present invention also provides methods of obtaining a transgenic plant seed comprising obtaining a transgenic seed from a transgenic plant obtainable as described above.

[0050] The present invention also provides methods of obtaining a transgenic progeny plant comprising obtaining a second-generation transgenic progeny plant from a first-generation transgenic plant obtainable by a method as described above, and optionally obtaining transgenic plants of one or more further generations from the second-generation progeny plant thus obtained.

[0051] The present invention also provides transgenic plant cells, plants, plant seeds or progeny plants obtainable by any of the methods described above.

[0052] The present invention also provides transgenic plants or plant seeds comprising plant cells as described above.

[0053] The present invention also provides transgenic plant cell calluses comprising plant cells as described above obtainable from a transgenic plant cell, first-generation plant, plant seed or progeny as defined above.

[0054] The present invention also provides methods of obtaining a crop product comprising harvesting a crop product from a plant according to any method described above and optionally further processing the harvested product.

[0055] The present invention also provides food that comprises a protein as defined above.

### BRIEF DESCRIPTION OF THE DRAWINGS

[0056] FIG. 1 shows a method to generate all possible peptide epitopes from a group of proteins.

[0057] FIG. 2 shows Genbank accession numbers for gluten gene products present in the Genbank database on 16 Jun. 2003.

[0058] FIG. 3A shows an expectation maximization (EM) algorithm to analyze data from ELISpot.

[0059] FIG. 3B shows a test on a dataset of patients with coeliac disease.

[0060] FIG. 4 shows an iterative procedure to find minimal set of responsive epitopes.

[0061] FIG. 5 shows gliadin and glutenin sequences (SEQ ID NOS: 1-1554). In the “consensus” column, letters in lower case use the standard one letter amino acid code, but letters in upper case have a different meaning: E=[e or q], F=[f or y or w], I=[i or l or v], S=[s or t], R=[r or k or h]. The “sequence” column uses the standard one letter amino acid code.

[0062] FIG. 6 shows gluten peptides that stimulate gamma interferon in PBMC collected 6 days after gluten challenge in HLA-DQ2+ coeliac disease volunteers (SEQ ID NOS: 1555-1655). The indicated 9mers are common to 200 groups of bioactive “structurally” related 20mer peptides. The gluten sequences are ranked according to the bioactivity x proportion of subjects responding.

[0063] FIG. 7 shows the results of a wheat challenge experiment (SEQ ID NOS: 1656-1671). These peptides gave high quality responses (indicated ‘Y’) in ten subjects (A-J) after wheat challenge. FIG. 8 shows Avenin peptides (+/−deamidation by tTG) that stimulate interferon-γ in PBMC collected 6 days after gluten challenge in HLA-DQ2+ coeliac disease volunteers (SEQ ID NOS: 1672-1698). Those marked with a * are optimal unique 20mers inducing IFN-γ after oats challenge.

[0064] FIG. 9 shows the most potent 40 20mers (SEQ ID NOS: 1699-1763) in two HLA-DQ8 (not HLA-DQ2) subjects grouped according to shared core sequences. The core sequence of group 6 (QGSFQPSQQ) corresponds to the alpha-gliadin epitope described by van de Wal et al (J. Immunol. 1998, 161(4):1585-1588). The maximum response in Subject A was 271 SFC (medium alone, no peptide response: 4 SFC), and in B it was 26 SFC (medium alone, no peptide response: 1 SFC).

[0065] FIG. 10 shows the amino acid sequence of A-gliadin (SEQ ID NO: 1928) based on amino acid sequencing.

### DETAILED DESCRIPTION OF THE INVENTION

[0066] The term “coeliac disease” encompasses a spectrum of conditions caused by varying degrees of gluten sensitivity, including a severe form characterised by a flat small intestinal mucosa (hyperplastic villous atrophy) and other forms characterised by milder symptoms.

[0067] The individual mentioned above (in the context of diagnosis or therapy) is human. They may have coeliac disease (symptomatic or asymptomatic) or be suspected of having it. They may be on a gluten free diet. They may be in an acute phase response (for example they may have coeliac disease, but have only ingested gluten in the last 24 hours before which they had been on a gluten free diet for 14 to 28 days).

[0068] The individual may be susceptible to coeliac disease, such as a genetic susceptibility (determined for example by the individual having relatives with coeliac disease or possessing genes which cause predisposition to coeliac disease).

### The Agent

[0069] The agent is typically a peptide, for example of length 7 to 50 amino acids, such as 10 to 40, 12 to 35 or 15 to 30 amino acids in length.

[0070] The agent may be the peptide represented by any of SEQ ID NOS: 1-1927 or an epitope comprising sequence that comprises any of SEQ ID NOS: 1-1927 which is an isolated oligopeptide derived from a gluten protein; or an equivalent of these sequences from a naturally occurring gluten protein. In a further set of embodiments of the invention, the agent is any peptide epitope of an oat gluten (e.g. any T cell epitope of an avenin).

[0071] Preferably, the agent is the peptide represented by any of SEQ ID NOS: 1578-1579, 1582-1583, 1587-1593, 1600-1620, 1623-1655, 1656-1671, 1672-1698, 1699-1763, 1764-1768, 1769-1786, 1787-1829, 1895-1903, 1906, and 1908-1927 or an epitope comprising sequence that comprises any of SEQ ID NOS: 1578-1579, 1582-1583, 1587-1593, 1600-1620, 1623-1655, 1656-1671, 1672-1698, 1699-1763, 1764-1768, 1769-1786, 1787-1829, 1895-1903, 1906, and 1908-1927 which is an isolated oligopeptide derived from a gluten protein; or an equivalent of these sequences from a naturally occurring gluten protein.

[0072] Thus the epitope may be a derivative of a naturally occurring gluten protein, particularly from a wheat or oat gluten. Such a derivative is typically a fragment of the gluten protein, or a mutated derivative of the whole protein or fragment. Therefore the epitope of the invention does not include the naturally occurring whole gluten protein, and does not include other whole naturally occurring gluten proteins.

[0073] Typically such fragments will be at least 7 amino acids in length (e.g., at least 7, 8, 9, 10, 11, 12, 13, 14 or 15 amino acids in length).

[0074] Typically such fragments will be recognised by T cells to at least the same extent that the agents from which they are derived are recognised in any of the assays described herein using samples from coeliac disease patients.

[0075] The agent may be the peptide represented by any of SEQ ID NOS: 1-1927, preferably the peptide represented by any of SEQ ID NOS: 1578-1579, 1582-1583, 1587-1593, 1600-1620, 1623-1655, 1656-1671, 1672-1698, 1699-1763, 1764-1768, 1769-1786, 1787-1829, 1895-1903, 1906, and 1908-1927 or a protein comprising a sequence corresponding to any of SEQ ID NOS: 1-1927, preferably comprising a sequence corresponding to any of from SEQ ID NOS: 1578-1579, 1582-1583, 1587-1593, 1600-1620, 1623-1655, 1656-1671, 1672-1698, 1699-1763, 1764-1768, 1769-1786, 1787-1829, 1895-1903, 1906, and 1908-1927 (such as fragments of a gluten protein comprising any of SEQ ID NOS: 1-1927 and preferably any of from SEQ ID NOS: 1578-1579, 1582-1583, 1587-1593, 1600-1620, 1623-1655, 1656-1671, 1672-1698, 1699-1763, 1764-1768, 1769-1786, 1787-1829, 1895-1903, 1906, and 1908-1927, for example after the gluten protein has been treated with transglutaminase). Bioactive fragments of such sequences are also agents of the invention. Typically such fragments will be at least 7 amino acids in length (e.g., at least 7, 8, 9, 10, 11, 12, 13, 14 or 15 amino acids in length). Sequences equivalent to any of SEQ ID NOS: 1-1927 or analogues of these sequences are also agents of the invention.

[0076] In the case where the epitope comprises a sequence equivalent to the above epitopes (including fragments) from another gluten protein (e.g. any of the gluten proteins mentioned herein or any gluten proteins which cause coeliac disease), such equivalent sequences will correspond to a fragment of a gluten protein typically treated (partially or fully) with transglutaminase. Such equivalent peptides can be determined by aligning the sequences of other gluten proteins with the gluten protein from which the original epitope derives (for example using any of the programs mentioned herein). Transglutaminase is commercially available (e.g. Sigma T-5398).

[0077] The agent which is an analogue is capable of being recognised by a TCR which recognises (i). Therefore generally when the analogue is added to T cells in the presence of (i), typically also in the presence of an antigen presenting cell (APC) (such as any of the APCs mentioned herein), the analogue inhibits the recognition of (i), i.e. the analogue is able to compete with (i) in such a system.

[0078] The analogue may be one which is capable of binding the TCR which recognises (i). Such binding can be tested by standard techniques. Such TCRs can be isolated from T cells which have been shown to recognise (i) (e.g. using the method of the invention). Demonstration of the binding of the analogue to the TCRs can then shown by determining whether the TCRs inhibit the binding of the analogue to a substance that binds the analogue, e.g. an antibody to the analogue. Typically the analogue is bound to a class II MHC molecule (e.g. HLA-DQ2) in such an inhibition of binding assay.

[0079] Typically the analogue inhibits the binding of (i) to a TCR. In this case the amount of (i) which can bind the TCR in the presence of the analogue is decreased. This is because the analogue is able to bind the TCR and therefore competes with (i) for binding to the TCR.

[0080] T cells for use in the above binding experiments can be isolated from patients with coeliac disease, for example with the aid of the method of the invention. Other binding characteristics of the analogue may also be the same as (i), and thus typically the analogue binds to the same MHC class II molecule to which the peptide binds (HLA-DQ2 or -DQ8). The analogue typically binds to antibodies specific for (i), and thus inhibits binding of (i) to such antibodies.

[0081] The analogue is typically a peptide. It may have homology with (i), typically at least 70% homology, preferably at least 80, 90%, 95%, 97% or 99% homology with (i), for example over a region of at least 7, 8, 9, 10, 11, 12, 13, 14, 15 or more (such as the entire length of the analogue and/or (i), or across the region which contacts the TCR or binds the MHC molecule) contiguous amino acids. Methods of measuring protein homology are well known in the art and it will be understood by those of skill in the art that in the present context, homology is calculated on the basis of amino acid identity (sometimes referred to as “hard homology”).

[0082] For example the UWGCG Package provides the BESTFIT program which can be used to calculate homology (for example used on its default settings) (Devereux et al (1984) Nucleic Acids Research 12, p387-395). The PILEUP and BLAST algorithms can be used to calculate homology or align sequences (typically on their default settings), for example as described in Altschul S. F. (1993) J Mol Evol 36:290-300; Altschul, S, F et al (1990) J Mol Biol 215:403-10.

[0083] Software for performing BLAST analyses is publicly available through the National Center for Biotechnology Information on the world wide web through the Internet at, for example, “www.ncbi.nlm.nih.gov/”. This algorithm involves first identifying high scoring sequence pair (HSPs) by identifying short words of length W in the query sequence that either match or satisfy some positive-valued threshold score T when aligned with a word of the same length in a database sequence. T is referred to as the neighbourhood word score threshold (Altschul et al, supra). These initial neighbourhood word hits act as seeds for initiating searches to find HSPs containing them. The word hits are extended in both directions along each sequence for as far as the cumulative alignment score can be increased. Extensions for the word hits in each direction are halted when: the cumulative alignment score falls off by the quantity X from its maximum achieved value; the cumulative score goes to zero or below, due to the accumulation of one or more negative-scoring residue alignments; or the end of either sequence is reached. The BLAST algorithm parameters W, T and X determine the sensitivity and speed of the alignment. The BLAST program uses as defaults a word length (W) of 11, the BLOSUM62 scoring matrix (see Henikoff and Henikoff (1992) Proc. Natl. Acad. Sci. USA 89: 10915-10919) alignments (B) of 50, expectation (E) of 10, M=5, N=4, and a comparison of both strands.

[0084] The BLAST algorithm performs a statistical analysis of the similarity between two sequences; see e.g., Karlin and Altschul (1993) Proc. Natl. Acad. Sci. USA 90: 5873-5787. One measure of similarity provided by the BLAST algorithm is the smallest sum probability (P(N)), which provides an indication of the probability by which a match between two nucleotide or amino acid sequences would occur by chance. For example, a sequence is considered similar to another sequence if the smallest sum probability in comparison of the first sequence to the second sequence is less than about 1, preferably less than about 0.1, more preferably less than about 0.01, and most preferably less than about 0.001.

[0085] The homologous peptide analogues typically differ from (i) by 1, 2, 3, 4, 5, 6, 7, 8 or more mutations (which may be substitutions, deletions or insertions). These mutations may be measured across any of the regions mentioned above in relation to calculating homology. The substitutions are preferably ‘conservative’. These are defined according to the following Table. Amino acids in the same block in the second column and preferably in the same line in the third column may be substituted for each other:

| | | | | | |
|---|---|---|---|---|---|
| ALIPHATIC | Non-polar | G | A | P | |
| | | I | L | V | |
| | Polar-uncharged | C | S | T | M |
| | | N | Q | | |
| | Polar-charged | D | E | | |
| | | K | R | | |
| AROMATIC | | H | F | W | Y |

[0086] Typically the amino acids in the analogue at the equivalent positions to amino acids in (i) that contribute to binding the MHC molecule or are responsible for the recognition by the TCR, are the same or are conserved.

[0087] Typically the analogue peptide comprises one or more modifications, which may be natural post-translation modifications or artificial modifications. The modification may provide a chemical moiety (typically by substitution of a hydrogen, e.g. of a C—H bond), such as an amino, acetyl, hydroxy or halogen (e.g. fluorine) group or carbohydrate group. Typically the modification is present on the N or C terminus.

[0088] The analogue may comprise one or more non-natural amino acids, for example amino acids with a side chain different from natural amino acids. Generally, the non-natural amino acid will have an N terminus and/or a C terminus. The non-natural amino acid may be an L- or a D-amino acid.

[0089] The analogue typically has a shape, size, flexibility or electronic configuration that is substantially similar to (i). It is typically a derivative of (i). In one embodiment the analogue is a fusion protein comprising the sequence of any of SEQ ID NOS: 1-1927 and non-gluten sequence. Preferably, the analogue according to this embodiment is a fusion protein comprising the sequence of any of SEQ ID NOs: 1578-1579, 1582-1583, 1587-1593, 1600-1620, 1623-1655, 1656-1671, 1672-1698, 1699-1763, 1764-1768, 1769-1786, 1787-1829, 1895-1903, 1906, and 1908-1927 and non-gluten sequence In one embodiment the analogue is or mimics (i) bound to a MHC class II molecule. 2, 3, 4 or more of such complexes may be associated or bound to each other, for example using a biotin/streptavidin based system, in which typically 2, 3 or 4 biotin labelled MHC molecules bind to a streptavidin moiety. This analogue typically inhibits the binding of the (i)/MHC Class II complex to a TCR or antibody which is specific for the complex.

[0090] The analogue is typically an antibody or a fragment of an antibody, such as a Fab or F(ab′)₂ fragment. The analogue may be immobilised on a solid support, particularly an analogue that mimics peptide bound to a MHC molecule.

[0091] The analogue is typically designed by computational means and then synthesised using methods known in the art. Alternatively the analogue can be selected from a library of compounds. The library may be a combinatorial library or a display library, such as a phage display library. The library of compounds may be expressed in the display library in the form of being bound to a MHC class II molecule, such as HLA-DQ2 or -DQ8. Analogues are generally selected from the library based on their ability to mimic the binding characteristics (i). Thus they may be selected based on ability to bind a TCR or antibody which recognises (i).

[0092] Typically analogues will be recognised by T cells to at least the same extent as any of the agents (i), for example at least to the same extent as the equivalent epitope is recognised in any of the assays described herein, typically using T cells from coeliac disease patients. Analogues may be recognised to these extents in vivo and thus may be able to induce coeliac disease symptoms to at least the same extent as any of the agents mentioned herein (e.g. in a human patient or animal model).

[0093] Analogues may be identified in a method comprising determining whether a candidate substance is recognised by a T cell receptor that recognises an epitope of the invention, recognition of the substance indicating that the substance is an analogue. Such TCRs may be any of the TCRs mentioned herein, and may be present on T cells. Any suitable assay mentioned herein can be used to identify the analogue. In one embodiment this method is carried out in vivo. As mentioned above preferred analogues are recognised to at least the same extent as the equivalent epitope, and so the method may be used to identify analogues which are recognised to this extent.

[0094] In one embodiment the method comprises determining whether a candidate substance is able to inhibit the recognition of an epitope of the invention, inhibition of recognition indicating that the substance is an analogue.

[0095] The agent may be a product comprising at least 2, 5, 10 or 20 agents as defined by (i) or (ii). Typically the composition comprises epitopes of the invention (or equivalent analogues) from different gluten proteins, such as any of the species or variety of or types of gluten protein mentioned herein. Preferred compositions comprise at least one epitope of the invention, or equivalent analogue, from all of the glutens present in any of the species or variety mentioned herein, or from 2, 3, 4 or more of the species mentioned herein (such as from the panel of species consisting of wheat, rye, barley, oats and triticale). Thus, the agent may be monovalent or multivalent.

[0096] According to certain embodiments of the invention, the agent does not have or is not based on a sequence disclosed in WO 02/083722 and/or WO 01/25793 and/or WO03/104273 and/or recited in any of SEQ ID NOS: 1555-1577, 1580-1581, 1584-1586, 1594-1599, 1621-1622 and/or is not an agent derived from A-gliadin, the sequence of which is given in FIG. 10.

[0097] Within SEQ ID NOs: 1-1927, a preferred subset is SEQ ID NOs: 1-1763. Within SEQ ID NOs: 1764-1927, preferred subsets are: (a) oat sequences 1764-1768, (b) rye sequences 1769-1786, (c) barley sequences 1787-1829, (d) wheat sequences 1895-1903, (e) wheat DQ8 sequences 1908-1927, and (f) combitope sequence 1906. Other preferred subsets are: (a) 1764-1768, (b) 1769-1773, (c) 1774-1786, (d) 1787-1792, (e) 1793-1829, (f) 1830-1894, (g) 1895-1903, (h) 1830-1903, (i) 1904-1906, (j) 1908-1916, (k) 1917-1927, and (1) 1908-1913, 1915-1923 and 1925-1927.

[0098] Within SEQ ID NOs: 1578-1579, 1582-1583, 1587-1593, 1600-1620, 1623-1655, 1656-1671, 1672-1698, 1699-1763, & 1764-1927, particularly preferred wheat epitopes are SEQ ID NOs: 1656-1671, 1830-1903, and 1907-1927.

[0099] Within SEQ ID NOs: 1830-1894 (Table 1), some sequences have N-terminal and C-terminal glycines. The invention extends to these sequences omitting the C-terminal glycine and/or the N-terminal glycine. Preferably, both the C-terminal glycine and the N-terminal glycine are omitted.

### Diagnosis

[0100] As mentioned above the method of diagnosis of the invention may be based on the detection of T cells that bind the agent or on the detection of antibodies that recognise the agent.

[0101] The T cells that recognise the agent in the method (which includes the use mentioned above) are generally T cells that have been pre-sensitised in vivo to one or more gluten proteins. As mentioned above such antigen-experienced T cells have been found to be present in the peripheral blood.

[0102] In the method the T cells can be contacted with the agent in vitro or in vivo, and determining whether the T cells recognise the agent can be performed in vitro or in vivo. Thus the invention provides the agent for use in a method of diagnosis practiced on the human body. Different agents are provided for simultaneous, separate or sequential use in such a method.

[0103] The in vitro method is typically carried out in aqueous solution into which the agent is added. The solution will also comprise the T cells (and in certain embodiments the APCs discussed below). The term ‘contacting’ as used herein includes adding the particular substance to the solution.

[0104] Determination of whether the T cells recognise the agent is generally accomplished by detecting a change in the state of the T cells in the presence of the agent or determining whether the T cells bind the agent. The change in state is generally caused by antigen specific functional activity of the T cell after the TCR binds the agent. The change of state may be measured inside (e.g. change in intracellular expression of proteins) or outside (e.g. detection of secreted substances) the T cells.

[0105] The change in state of the T cell may be the start of or increase in secretion of a substance from the T cell, such as a cytokine, especially IFN-γ, IL-2 or TNF-α. Determination of IFN-Y secretion is particularly preferred. The substance can typically be detected by allowing it to bind to a specific binding agent and then measuring the presence of the specific binding agent/substance complex. The specific binding agent is typically an antibody, such as polyclonal or monoclonal antibodies. Antibodies to cytokines are commercially available, or can be made using standard techniques.

[0106] Typically the specific binding agent is immobilised on a solid support. After the substance is allowed to bind the solid support can optionally be washed to remove material which is not specifically bound to the agent. The agent/substance complex may be detected by using a second binding agent that will bind the complex. Typically the second agent binds the substance at a site which is different from the site which binds the first agent. The second agent is preferably an antibody and is labelled directly or indirectly by a detectable label.

[0107] Thus the second agent may be detected by a third agent that is typically labelled directly or indirectly by a detectable label. For example the second agent may comprise a biotin moiety, allowing detection by a third agent which comprises a streptavidin moiety and typically alkaline phosphatase as a detectable label.

[0108] In one embodiment the detection system which is used is the ex-vivo ELISPOT assay described in WO 98/23960. In that assay IFN-γ secreted from the T cell is bound by a first IFN-γ specific antibody that is immobilised on a solid support. The bound IFN-γ is then detected using a second IFN-γ specific antibody which is labelled with a detectable label. Such a labelled antibody can be obtained from MABTECH (Stockholm, Sweden). Other detectable labels which can be used are discussed below.

[0109] The change in state of the T cell that can be measured may be the increase in the uptake of substances by the T cell, such as the uptake of thymidine. The change in state may be an increase in the size of the T cells, or proliferation of the T cells, or a change in cell surface markers on the T cell.

[0110] In one embodiment the change of state is detected by measuring the change in the intracellular expression of proteins, for example the increase in intracellular expression of any of the cytokines mentioned above. Such intracellular changes nay be detected by contacting the inside of the T cell with a moiety that binds the expressed proteins in a specific manner and which allows sorting of the T cells by flow cytometry.

[0111] In one embodiment when binding the TCR the agent is bound to an MHC class II molecule (typically HLA-DQ2 or -DQ8), which is typically present on the surface of an antigen presenting cell (APC). However as mentioned herein other agents can bind a TCR without the need to also bind an MHC molecule.

[0112] Generally the T cells which are contacted in the method are taken from the individual in a blood sample, although other types of samples which contain T cells can be used. The sample may be added directly to the assay or may be processed first. Typically the processing may comprise diluting of the sample, for example with water or buffer. Typically the sample is diluted from 1.5 to 100 fold, for example 2 to 50 or 5 to 10 fold.

[0113] The processing may comprise separation of components of the sample. Typically mononuclear cells (MCs) are separated from the samples. The MCs will comprise the T cells and APCs. Thus in the method the APCs present in the separated MCs can present the peptide to the T cells. In another embodiment only T cells, such as only CD4 T cells, can be purified from the sample. PBMCs, MCs and T cells can be separated from the sample using techniques known in the art, such as those described in Lalvani et al (1997) J. Exp. Med. 186, p859-865.

[0114] In one embodiment, the T cells used in the assay are in the form of unprocessed or diluted samples, or are freshly isolated T cells (such as in the form of freshly isolated MCs or PBMCs) which are used directly ex vivo, i.e. they are not cultured before being used in the method. Thus the T cells have not been restimulated in an antigen specific manner in vitro. However the T cells can be cultured before use, for example in the presence of one or more of the agents, and generally also exogenous growth promoting cytokines. During culturing the agent(s) are typically present on the surface of APCs, such as the APC used in the method. Pre-culturing of the T cells may lead to an increase in the sensitivity of the method. Thus the T cells can be converted into cell lines, such as short term cell lines (for example as described in Ota et al (1990) Nature 346, pl83-187).

[0115] The APC that is typically present in the method may be from the same individual as the T cell or from a different host. The APC may be a naturally occurring APC or an artificial APC. The APC is a cell that is capable of presenting the peptide to a T cell. It is typically a B cell, dendritic cell or macrophage. It is typically separated from the same sample as the T cell and is typically co-purified with the T cell. Thus the APC may be present in MCs or PBMCs. The APC is typically a freshly isolated ex vivo cell or a cultured cell. It may be in the form of a cell line, such as a short term or immortalised cell line. The APC may express empty MHC class II molecules on its surface.

[0116] In the method one or more (different) agents may be used. Typically the T cells derived from the sample can be placed into an assay with all the agents which it is intended to test or the T cells can be divided and placed into separate assays each of which contain one or more of the agents.

[0117] The invention also provides the agents such as two or more of any of the agents mentioned herein (e.g. the combinations of agents which are present in the composition agent discussed above) for simultaneous separate or sequential use (e.g. for in vivo use).

[0118] In one embodiment agent per se is added directly to an assay comprising T cells and APCs. As discussed above the T cells and APCs in such an assay could be in the form of MCs. When agents that can be recognised by the T cell without the need for presentation by APCs are used then APCs are not required. Analogues which mimic the original (i) bound to a MHC molecule are an example of such an agent.

[0119] In one embodiment the agent is provided to the APC in the absence of the T cell. The APC is then provided to the T cell, typically after being allowed to present the agent on its surface. The peptide may have been taken up inside the APC and presented, or simply be taken up onto the surface without entering inside the APC.

[0120] The duration for which the agent is contacted with the T cells will vary depending on the method used for determining recognition of the peptide. Typically 10⁵ to 10⁷, preferably 5×10⁵ to 10⁶ PBMCs are added to each assay. In the case where agent is added directly to the assay its concentration is from 10⁻¹ to 10³ μg/ml, preferably 0.5 to 50 μg/ml or 1 to 10 μg/ml.

[0121] Typically the length of time for which the T cells are incubated with the agent is from 4 to 24 hours, preferably 6 to 16 hours. When using ex vivo PBMCs it has been found that 0.3×10⁶ PBMCs can be incubated in 10 μg/ml of peptide for 12 hours at 37° C.

[0122] The determination of the recognition of the agent by the T cells may be done by measuring the binding of the agent to the T cells (this can be carried out using any suitable binding assay format discussed herein). Typically T cells which bind the agent can be sorted based on this binding, for example using a FACS machine. The presence of T cells that recognise the agent will be deemed to occur if the frequency of cells sorted using the agent is above a “control” value. The frequency of antigen-experienced T cells is generally 1 in 10⁶ to 1 in 10³, and therefore whether or not the sorted cells are antigen-experienced T cells can be determined.

[0123] The determination of the recognition of the agent by the T cells may be measured in vivo. Typically the agent is administered to the host and then a response which indicates recognition of the agent may be measured. The agent is typically administered intradermally or epidermally. The agent is typically administered by contacting with the outside of the skin, and may be retained at the site with the aid of a plaster or dressing. Alternatively the agent may be administered by needle, such as by injection, but can also be administered by other methods such as ballistics (e.g. the ballistics techniques which have been used to deliver nucleic acids). EP-A-0693119 describes techniques that can typically be used to administer the agent. Typically from 0.001 to 1000 μg, for example from 0.01 to 100 μg or 0.1 to 10 μg of agent is administered.

[0124] In one embodiment a product can be administered which is capable of providing the agent in vivo. Thus a polynucleotide capable of expressing the agent can be administered, typically in any of the ways described above for the administration of the agent. The polynucleotide typically has any of the characteristics of the polynucleotide provided by the invention which is discussed below. The agent is expressed from the polynucleotide in vivo. Typically from 0.001 to 1000 μg, for example from 0.01 to 100 μg or 0.1 to 10 μg of polynucleotide is administered.

[0125] Recognition of the agent administered to the skin is typically indicated by the occurrence of inflammation (e.g. induration, erythema or oedema) at the site of administration. This is generally measured by visual examination of the site.

[0126] The method of diagnosis based on the detection of an antibody that binds the agent is typically carried out by contacting a sample from the individual (such as any of the samples mentioned here, optionally processed in any manner mentioned herein) with the agent and determining whether an antibody in the sample binds the agent, such a binding indicating that the individual has, or is susceptible to coeliac disease. Any suitable format of binding assay may be used, such as any such format mentioned herein.

### Therapy

[0127] The identification of the immunodominant epitope and other epitopes described herein allows therapeutic products to be made which target the T cells which recognise this epitope (such T cells being ones which participate in the immune response against gluten proteins). These findings also allow the prevention or treatment of coeliac disease by suppressing (by tolerisation) an antibody or T cell response to the epitope(s).

[0128] Certain agents of the invention bind the TCR that recognises the epitope of the invention (as measured using any of the binding assays discussed above) and cause tolerisation of the T cell that carries the TCR. Such agents, optionally in association with a carrier, can therefore be used to prevent or treat coeliac disease.

[0129] Generally tolerisation can be caused by the same peptides which can (after being recognised by the TCR) cause antigen specific functional activity of the T cell (such as any such activity mentioned herein, e.g. secretion of cytokines). Such agents cause tolerisation when they are presented to the immune system in a ‘tolerising’ context.

[0130] Tolerisation leads to a decrease in the recognition of a T cell or antibody epitope by the immune system. In the case of a T cell epitope this can be caused by the deletion or anergising of T cells that recognise the epitope. Thus T cell activity (for example as measured in suitable assays mentioned herein) in response to the epitope is decreased. Tolerisation of an antibody response means that a decreased amount of specific antibody to the epitope is produced when the epitope is administered.

[0131] Methods of presenting antigens to the immune system in such a context are known and are described for example in Yoshida et al. Clin. Immunol. Immunopathol. 82, 207-215 (1997), Thurau et al. Clin. Exp. Immunol. 109, 370-6 (1997), and Weiner et al. Res. Immunol. 148, 528-33 (1997). In particular certain routes of administration can cause tolerisation, such as oral, nasal or intraperitoneal. Tolerisation may also be accomplished via dendritic cells and tetramers presenting peptide. Particular products which cause tolerisation may be administered (e.g. in a composition that also comprises the agent) to the individual. Such products include cytokines, such as cytokines that favour a Th2 response (e.g. IL-4, TGF-β or IL-10). Products or agent may be administered at a dose that causes tolerisation.

[0132] The invention provides a protein that comprises a sequence able to act as an antagonist of the T cell (which T cell recognises the agent). Such proteins and such antagonists can also be used to prevent or treat coeliac disease. The antagonist will cause a decrease in the T cell response. In one embodiment, the antagonist binds the TCR of the T cell (generally in the form of a complex with HLA-DQ2 or -DQ8) but instead of causing normal functional activation causing an abnormal signal to be passed through the TCR intracellular signalling cascade, which causes the T cell to have decreased function activity (e.g. in response to recognition of an epitope, typically as measured by any suitable assay mentioned herein).

[0133] In one embodiment the antagonist competes with epitope to bind a component of MHC processing and presentation pathway, such as an MHC molecule (typically HLA-DQ2 or -DQ8). Thus the antagonist may bind HLA-DQ2 or -DQ8 (and thus be a peptide presented by this MHC molecule) or a homologue thereof.

[0134] Methods of causing antagonism are known in the art. In one embodiment the antagonist is a homologue of the epitopes mentioned above and may have any of the sequence, binding or other properties of the agent (particularly analogues). The antagonists typically differ from any of the above epitopes (which are capable of causing a normal antigen specific function in the T cell) by 1, 2, 3, 4 or more mutations (each of which may be a substitution, insertion or deletion). Such antagonists are termed “altered peptide ligands” or “APL” in the art. The mutations are typically at the amino acid positions that contact the TCR.

[0135] For example, the antagonist may differ from the epitope by a substitution within the sequence that is equivalent to the sequence represented by amino acids 64 to 67 of A-gliadin (the sequence of A-gliadin is given in FIG. 10). Thus preferably the antagonist has a substitution at the equivalent of position 64, 65 or 67. Preferably the substitution is 64W, 67W, 67M or 65T.

[0136] Since the T cell immune response to the epitope of the invention in an individual is polyclonal, more than one antagonist may need to be administered to cause antagonism of T cells of the response which have different TCRs. Therefore the antagonists may be administered in a composition which comprises at least 2, 4, 6 or more different antagonists, which each antagonise different T cells.

[0137] The invention also provides a method of identifying an antagonist of a T cell (which recognises the agent), comprising contacting a candidate substance with the T cell and detecting whether the substance causes a decrease in the ability of the T cell to undergo an antigen specific response (e.g. using any suitable assay mentioned herein), the detecting of any such decrease in said ability indicating that the substance is an antagonist.

[0138] In one embodiment, the antagonists (including combinations of antagonists to a particular epitope) or tolerising (T cell and antibody tolerising) agents are present in a composition comprising at least 2, 4, 6 or more antagonists or agents which antagonise or tolerise to different epitopes of the invention, for example to the combinations of epitopes discussed above in relation to the agents which are a product comprising more than one substance.

### Testing Whether a Composition is Capable of Causing Coeliac Disease

[0139] As mentioned above the invention provides a method of determining whether a composition is capable of causing coeliac disease comprising detecting the presence of a protein sequence which is capable of being modified by a transglutaminase to as sequence comprising the agent or epitope of the invention (such transglutaminase activity may be a human intestinal transglutaminase activity). Typically this is performed by using a binding assay in which a moiety which binds to the sequence in a specific manner is contacted with the composition and the formation of sequence/moiety complex is detected and used to ascertain the presence of the agent. Such a moiety may be any suitable substance (or type of substance) mentioned herein, and is typically a specific antibody. Any suitable format of binding assay can be used (such as those mentioned herein).

[0140] In one embodiment, the composition is contacted with at least 2, 5, 10 or more antibodies which are specific for epitopes of the invention from different gluten proteins, for example a panel of antibodies capable of recognising the combinations of epitopes discussed above in relation to agents of the invention which are a product comprising more than one substance.

[0141] The composition typically comprises material from a plant that expresses a gluten protein which is capable of causing coeliac disease (for example any of the gluten proteins or plants mentioned herein). Such material may be a plant part, such as a harvested product (e.g. seed). The material may be processed products of the plant material (e.g. any such product mentioned herein), such as a flour or food that comprises the gluten protein. The processing of food material and testing in suitable binding assays is routine, for example as mentioned in Kricka L J, J. Biolumin. Chemilumin. 13,189-93 (1998).

### Binding Assays

[0142] The determination of binding between any two substances mentioned herein may be done by measuring a characteristic of either or both substances that changes upon binding, such as a spectroscopic change.

[0143] The binding assay format may be a ‘band shift’ system. This involves determining whether the presence of one substance (such as a candidate substance) advances or retards the progress of the other substance during gel electrophoresis.

[0144] The format may be a competitive binding method which determines whether the one substance is able to inhibit the binding of the other substance to an agent which is known to bind the other substance, such as a specific antibody.

### Mutant Gluten Proteins

[0145] The invention provides a gluten protein in which an epitope sequence of the invention, or sequence which can be modified by a transglutaminase to provide such a sequence has been mutated so that it no longer causes, or is recognised by, a T cell response that recognises the epitope. In this context the term recognition refers to the TCR binding the epitope in such a way that normal (not antagonistic) antigen-specific functional activity of the T cell occurs.

[0146] Methods of identifying equivalent epitopes in other gluten proteins are discussed above. The wild type of the mutated gluten protein is one which causes coeliac disease. Such a mutated gluten protein may have homology with the wild type of the mutated gluten protein, for example to the degree mentioned above (in relation to the analogue) across all of its sequence or across 15, 30, 60, 100 or 200 contiguous amino acids of its sequence. The sequences of other natural gluten proteins are known in the art.

[0147] The mutated gluten protein will not cause coeliac disease or will cause decreased symptoms of coeliac disease. Typically the mutation decreases the ability of the epitope to induce a T cell response. The mutated epitope may have a decreased binding to HLA-DQ2 or -DQ8, a decreased ability to be presented by an APC or a decreased ability to bind to or to be recognised (i.e. cause antigen-specific functional activity) by T cells that recognise the agent. The mutated gluten protein or epitope will therefore show no or reduced recognition in any of the assays mentioned herein in relation to the diagnostic aspects of the invention.

[0148] The mutation may be one or more deletions, additions or substitutions of length 1 to 3, 4 to 6, 6 to 10, 11 to 15 or more in the epitope, for example across any of SEQ ID NOS: 1-1927; or across equivalents thereof. Preferably the mutant gluten protein has at least one mutation in the sequence of any of SEQ ID NO: 1-1927. A preferred mutation is at the position equivalent to position 65 in A-gliadin (see FIG. 10). Preferably, a naturally occurring glutamine is substituted to histidine, tyrosine, tryptophan, lysine, proline, or arginine.

[0149] The invention thus also provides use of a mutation (such any of the mutations in any of the sequences discussed herein) in an epitope of a gluten protein, which epitope is an epitope of the invention, to decrease the ability of the gluten protein to cause coeliac disease.

[0150] In one embodiment the mutated sequence is able to act as an antagonist. Thus the invention provides a protein that comprises a sequence which is able to bind to a T cell receptor, which T cell receptor recognises an agent of the invention, and which sequence is able to cause antagonism of a T cell that carries such a T cell receptor.

[0151] The invention also provides proteins which are fragments of the above mutant gluten proteins, which are at least 7 amino acids long (e.g. at least 8, 9, 10, 11, 12, 13, 14, 15, 30, 60, 100, 150, 200, or 250 amino acids long) and which comprise the mutations discussed above which decrease the ability of the gluten protein to be recognised. Any of the mutant proteins (including fragments) mentioned herein may also be present in the form of fusion proteins, for example with other gluten proteins or with non-gluten proteins.

[0152] The equivalent wild type protein to the mutated gluten protein is typically from a graminaceous monocotyledon, such as a plant of a genus selected from Triticum, Secale, Hordeum, Triticale or Avena, (e.g. wheat, rye, barley, oats or triticale). For example, the protein may be an α, αβ, β, γ or ω gliadin or an avenin.

### Kits

[0153] The invention also provides a kit for carrying out the method comprising one or more agents and optionally a means to detect the recognition of the agent by the T cell. Typically the different agents are provided for simultaneous, separate or sequential use. Typically the means to detect recognition allows or aids detection based on the techniques discussed above.

[0154] Thus the means may allow detection of a substance secreted by the T cells after recognition. The kit may thus additionally include a specific binding moiety for the substance, such as an antibody. The moiety is typically specific for IFN-γ. The moiety is typically immobilised on a solid support. This means that after binding the moiety the substance will remain in the vicinity of the T cell which secreted it. Thus “spots” of substance/moiety complex are formed on the support, each spot representing a T cell which is secreting the substance. Quantifying the spots, and typically comparing against a control, allows determination of recognition of the agent.

[0155] The kit may also comprise a means to detect the substance/moiety complex. A detectable change may occur in the moiety itself after binding the substance, such as a colour change. Alternatively a second moiety directly or indirectly labelled for detection may be allowed to bind the substance/moiety complex to allow the determination of the spots. As discussed above the second moiety may be specific for the substance, but binds a different site on the substance than the first moiety.

[0156] The immobilised support may be a plate with wells, such as a microtitre plate. Each assay can therefore be carried out in a separate well in the plate.

[0157] The kit may additionally comprise medium for the T cells, detection moieties or washing buffers to be used in the detection steps. The kit may additionally comprise reagents suitable for the separation from the sample, such as the separation of PBMCs or T cells from the sample. The kit may be designed to allow detection of the T cells directly in the sample without requiring any separation of the components of the sample.

[0158] The kit may comprise an instrument which allows administration of the agent, such as intradermal or epidermal administration. Typically such an instrument comprises plaster, dressing or one or more needles. The instrument may allow ballistic delivery of the agent. The agent in the kit may be in the form of a pharmaceutical composition.

[0159] The kit may also comprise controls, such as positive or negative controls. The positive control may allow the detection system to be tested. Thus the positive control typically mimics recognition of the agent in any of the above methods. Typically in the kits designed to determine recognition in vitro the positive control is a cytokine. In the kit designed to detect in vivo recognition of the agent the positive control may be antigen to which most individuals should response.

[0160] The kit may also comprise a means to take a sample containing T cells from the host, such as a blood sample. The kit may comprise a means to separate mononuclear cells or T cells from a sample from the host.

### Polynucleotides, Cells, Transgenic Mammals and Antibodies

[0161] The invention also provides a polynucleotide which is capable of expression to provide the agent or mutant gluten proteins. Typically the polynucleotide is DNA or RNA, and is single or double stranded. The polynucleotide will preferably comprise at least 50 bases or base pairs, for example 50 to 100, 100 to 500, 500 to 1000 or 1000 to 2000 or more bases or base pairs. The polynucleotide therefore comprises a sequence which encodes the sequence of any of SEQ ID NO: 1-1927 or any of the other agents mentioned herein. To the 5′ and 3′ of this coding sequence the polynucleotide of the invention has sequence or codons which are different from the sequence or codons 5′ and 3′ to these sequences in the corresponding gluten protein gene.

[0162] 5′ and/or 3′ to the sequence encoding the peptide the polynucleotide has coding or non-coding sequence. Sequence 5′ and/or 3′ to the coding sequence may comprise sequences which aid expression, such as transcription and/or translation, of the sequence encoding the agent. The polynucleotide may be capable of expressing the agent prokaryotic or eukaryotic cell. In one embodiment the polynucleotide is capable of expressing the agent in a mammalian cell, such as a human, primate or rodent (e.g. mouse or rat) cell.

[0163] A polynucleotide of the invention may hybridise selectively to a polynucleotide that encodes a gluten protein from which the agent is derived at a level significantly above background. Selective hybridisation is typically achieved using conditions of medium to high stringency (for example 0.03M sodium chloride and 0.03M sodium citrate at from about 50° C. to about 60° C.). However, such hybridisation may be carried out under any suitable conditions known in the art (see Sambrook et al (1989), Molecular Cloning: A Laboratory Manual). For example, if high stringency is required, suitable conditions include 0.2×SSC at 60° C. If lower stringency is required, suitable conditions include 2×SSC at 60° C.

[0164] Agents or proteins of the invention may be encoded by the polynucleotides described herein.

[0165] The polynucleotide may form or be incorporated into a replicable vector. Such a vector is able to replicate in a suitable cell. The vector may be an expression vector. In such a vector the polynucleotide of the invention is operably linked to a control sequence which is capable of providing for the expression of the polynucleotide. The vector may contain a selectable marker, such as the ampicillin resistance gene.

[0166] The polynucleotide or vector may be present in a cell. Such a cell may have been transformed by the polynucleotide or vector. The cell may express the agent. The cell will be chosen to be compatible with the said vector and may for example be a prokaryotic (bacterial), yeast, insect or mammalian cell. The polynucleotide or vector may be introduced into host cells using conventional techniques including calcium phosphate precipitation, DEAE-dextran transfection, or electroporation.

[0167] The invention provides processes for the production of the proteins of the invention by recombinant means. This may comprise (a) cultivating a transformed cell as defined above under conditions that allow the expression of the protein; and preferably (b) recovering the expressed polypeptide. Optionally, the polypeptide may be isolated and/or purified, by techniques known in the art.

[0168] The invention also provides TCRs which recognise (or bind) the agent, or fragments thereof which are capable of such recognition (or binding). These can be present in the any form mentioned herein (e.g. purity) discussed herein in relation to the protein of the invention. The invention also provides T cells which express such TCRs which can be present in any form (e.g. purity) discussed herein for the cells of the invention.

[0169] The invention also provides monoclonal or polyclonal antibodies which specifically recognise the agents (such as any of the epitopes of the invention) and which recognise the mutant gluten proteins (and typically which do not recognise the equivalent wild-type gluten proteins) of the invention, and methods of making such antibodies. Antibodies of the invention bind specifically to these substances of the invention.

[0170] For the purposes of this invention, the term “antibody” includes antibody fragments such as Fv, F(ab) and F(ab′)₂ fragments, as well as single-chain antibodies.

[0171] A method for producing a polyclonal antibody comprises immunising a suitable host animal, for example an experimental animal, with the immunogen and isolating immunoglobulins from the serum. The animal may therefore be inoculated with the immunogen, blood subsequently removed from the animal and the IgG fraction purified. A method for producing a monoclonal antibody comprises immortalising cells which produce the desired antibody. Hybridoma cells may be produced by fusing spleen cells from an inoculated experimental animal with tumour cells (Kohler and Milstein (1975) Nature 256, 495-497).

[0172] An immortalized cell producing the desired antibody may be selected by a conventional procedure. The hybridomas may be grown in culture or injected intraperitoneally for formation of ascites fluid or into the blood stream of an allogenic host or immunocompromised host. Human antibody may be prepared by in vitro immunisation of human lymphocytes, followed by transformation of the lymphocytes with Epstein-Barr virus.

[0173] For the production of both monoclonal and polyclonal antibodies, the experimental animal is suitably a goat, rabbit, rat or mouse. If desired, the immunogen may be administered as a conjugate in which the immunogen is coupled, for example via a side chain of one of the amino acid residues, to a suitable carrier. The carrier molecule is typically a physiologically acceptable carrier. The antibody obtained may be isolated and, if desired, purified.

[0174] The polynucleotide, agent, protein or antibody of the invention, may carry a detectable label. Detectable labels which allow detection of the secreted substance by visual inspection, optionally with the aid of an optical magnifying means, are preferred. Such a system is typically based on an enzyme label which causes colour change in a substrate, for example alkaline phosphatase causing a colour change in a substrate. Such substrates are commercially available, e.g. from BioRad. Other suitable labels include other enzymes such as peroxidase, or protein labels, such as biotin; or radioisotopes, such as ³²P or ³⁵S. The above labels may be detected using known techniques.

[0175] Polynucleotides, agents, proteins, antibodies or cells of the invention may be in substantially purified form. They may be in substantially isolated form, in which case they will generally comprise at least 80% e.g. at least 90, 95, 97 or 99% of the polynucleotide, peptide, antibody, cells or dry mass in the preparation. The polynucleotide, agent, protein or antibody is typically substantially free of other cellular components. The polynucleotide, agent, protein or antibody may be used in such a substantially isolated, purified or free form in the method or be present in such forms in the kit.

[0176] The invention also provides a transgenic non-human mammal which expresses a TCR of the invention. This may be any of the mammals discussed herein (e.g. in relation to the production of the antibody). Preferably the mammal has, or is susceptible, to coeliac disease. The mammal may also express HLA-DQ2 or -DQ8 or HLA-DR3-DQ2 and/or may be given a diet comprising a gluten protein which causes coeliac disease (e.g. any of the gluten proteins mentioned herein). Thus the mammal may act as an animal model for coeliac disease.

[0177] The invention also provides a method of identifying a product which is therapeutic for coeliac disease comprising administering a candidate substance to a mammal of the invention which has, or which is susceptible to, coeliac disease and determining whether substance prevents or treats coeliac disease in the mammal, the prevention or treatment of coeliac disease indicating that the substance is a therapeutic product. Such a product may be used to treat or prevent coeliac disease.

[0178] The invention provides therapeutic (including prophylactic) agents or diagnostic substances (the agents, proteins and polynucleotides of the invention). These substances are formulated for clinical administration by mixing them with a pharmaceutically acceptable carrier or diluent. For example they can be formulated for topical, parenteral, intravenous, intramuscular, subcutaneous, intraocular, intradermal, epidermal or transdermal administration. The substances may be mixed with any vehicle which is pharmaceutically acceptable and appropriate for the desired route of administration. The pharmaceutically carrier or diluent for injection may be, for example, a sterile or isotonic solution such as Water for Injection or physiological saline, or a carrier particle for ballistic delivery.

[0179] The dose of the substances may be adjusted according to various parameters, especially according to the agent used; the age, weight and condition of the patient to be treated; the mode of administration used; the severity of the condition to be treated; and the required clinical regimen. As a guide, the amount of substance administered by injection is suitably from 0.01 mg/kg to 30 mg/kg, preferably from 0.1 mg/kg to 10 mg/kg.

[0180] The routes of administration and dosages described are intended only as a guide since a skilled practitioner will be able to determine readily the optimum route of administration and dosage for any particular patient and condition.

[0181] The substances of the invention may thus be used in a method of treatment of the human or animal body, or in a diagnostic method practised on the human body. In particular they may be used in a method of treating or preventing coeliac disease. The invention also provide the agents for use in a method of manufacture of a medicament for treating or preventing coeliac disease. Thus the invention provides a method of preventing or treating coeliac disease comprising administering to a human in need thereof a substance of the invention (typically a non-toxic effective amount thereof).

[0182] The agent of the invention can be made using standard synthetic chemistry techniques, such as by use of an automated synthesizer. The agent may be made from a longer polypeptide e.g. a fusion protein, which polypeptide typically comprises the sequence of the peptide. The peptide may be derived from the polypeptide by for example hydrolysing the polypeptide, such as using a protease; or by physically breaking the polypeptide. The polynucleotide of the invention can be made using standard techniques, such as by using a synthesiser.

### Plant Cells and Plants That Express Mutant Gluten Proteins or Express Proteins Comprising Sequences Which Can Act as Antagonists

[0183] The cell of the invention may be a plant cell, such as a cell of a graminaceous monocotyledonous species. The species may be one whose wild-type form expresses gluten proteins, such as any of the gluten proteins mentioned herein. Such a gluten protein may cause coeliac disease in humans. The cell may be of wheat, maize, oats, rye, rice, barley, triticale, sorghum, or sugar cane. Typically the cell is of the Triticum genus, such as aestivum, spelta, polonicum or monococcum.

[0184] The plant cell of the invention is typically one which does not express one or more wild-type gluten proteins (such as any of the gluten proteins mentioned herein which may cause coeliac disease), or one which does not express one or more gluten proteins comprising a sequence that can be recognised by a T cell that recognises the agent. Thus if the wild-type plant cell did express such a gluten protein then it may be engineered to prevent or reduce the expression of such a gluten protein or to change the amino acid sequence of the gluten protein so that it no longer causes coeliac disease (typically by no longer expressing the epitope of the invention).

[0185] This can be done for example by introducing mutations into 1, 2, 3 or more or all of such gluten protein genes in the cell, for example into coding or non-coding (e.g. promoter regions). Such mutations can be any of the type or length of mutations discussed herein (e.g., in relation to homologous proteins). The mutations can be introduced in a directed manner (e.g., using site directed mutagenesis or homologous recombination techniques) or in a random manner (e.g. using a mutagen, and then typically selecting for mutagenised cells which no longer express the gluten protein (or a gluten protein sequence which causes coeliac disease)).

[0186] In the case of plants or plant cells that express a protein that comprises a sequence able to act as an antagonist such a plant or plant cell may express a wild-type gluten protein (e.g. one which causes coeliac disease). Preferably though the presence of the antagonist sequence will cause reduced coeliac disease symptoms (such as no symptoms) in an individual who ingests a food comprising protein from the plant or plant cell.

[0187] The polynucleotide which is present in (or which was transformed into) the plant cell will generally comprise promoter capable of expressing the mutant gluten protein the plant cell. Depending on the pattern of expression desired, the promoter may be constitutive, tissue- or stage-specific; and/or inducible. For example, strong constitutive expression in plants can be obtained with the CAMV 35S, Rubisco ssu, or histone promoters. Also, tissue-specific or stage-specific promoters may be used to target expression of protein of the invention to particular tissues in a transgenic plant or to particular stages in its development. Thus, for example seed-specific, root-specific, leaf-specific, flower-specific etc promoters may be used. Seed-specific promoters include those described by Dalta et al (Biotechnology Ann. Rev. (1997), 3, pp.269-296). Particular examples of seed-specific promoters are napin promoters (EP-A-0 255, 378), phaseolin promoters, glutenine promoters, helianthenine promoters (WO92/17580), albumin promoters (W098/45460), oleosin promoters (WO98/45461) and ATS1 and ATS3 promoters (WO99/20775).

[0188] The cell may be in any form. For example, it may be an isolated cell, e.g. a protoplast, or it may be part of a plant tissue, e.g. a callus, or a tissue excised from a plant, or it may be part of a whole plant. The cell may be of any type (e.g. of any type of plant part). For example, an undifferentiated cell, such as a callus cell; or a differentiated cell, such as a cell of a type found in embryos, pollen, roots, shoots or leaves. Plant parts include roots; shoots; leaves; and parts involved in reproduction, such as pollen, ova, stamens, anthers, petals, sepals and other flower parts.

[0189] The invention provides a method of obtaining a transgenic plant cell comprising transforming a plant cell with a polynucleotide or vector of the invention to give a transgenic plant cell. Any suitable transformation method may be used (in the case of wheat the techniques disclosed in Vasil V et al, Biotechnology 10, 667-674 (1992) may be used). Preferred transformation techniques include electroporation of plant protoplasts and particle bombardment. Transformation may thus give rise to a chimeric tissue or plant in which some cells are transgenic and some are not.

[0190] The cell of the invention or thus obtained cell may be regenerated into a transgenic plant by techniques known in the art. These may involve the use of plant growth substances such as auxins, giberellins and/or cytokinins to stimulate the growth and/or division of the transgenic cell. Similarly, techniques such as somatic embryogenesis and meristem culture may be used. Regeneration techniques are well known in the art and examples can be found in, e.g. U.S. Pat. No. 4,459,355, U.S. Pat. No. 4,536,475, U.S. Pat. No. 5,464,763, U.S. Pat. No. 5,177,010, U.S. Pat. No. 5,187,073, EP 267,159, EP 604, 662, EP 672, 752, U.S. Pat. No. 4,945,050, U.S. Pat. No. 5,036,006, U.S. Pat. No. 5,100,792, U.S. Pat. No. 5,371,014, U.S. Pat. No. 5,478,744, U.S. Pat. No. 5,179,022, U.S. Pat. No. 5,565,346, U.S. Pat. No. 5,484,956, U.S. Pat. No. 5,508,468, U.S. Pat. No. 5,538,877, U.S. Pat. No. 5,554,798, U.S. Pat. No. 5,489,520, U.S. Pat. No. 5,510,318, U.S. Pat. No. 5,204,253, U.S. Pat. No. 5,405,765, EP 442,174, EP 486,233, EP 486,234, EP 539,563, EP 674,725, WO91/02071 and WO 95/06128.

[0191] In many such techniques, one step is the formation of a callus, i.e. a plant tissue comprising expanding and/or dividing cells. Such calli are a further aspect of the invention as are other types of plant cell cultures and plant parts. Thus, for example, the invention provides transgenic plant tissues and parts, including embryos, meristems, seeds, shoots, roots, stems, leaves and flower parts. These may be chimeric in the sense that some of their cells are cells of the invention and some are not. Transgenic plant parts and tissues, plants and seeds of the invention may be of any of the plant species mentioned herein.

[0192] Regeneration procedures will typically involve the selection of transformed cells by means of marker genes.

[0193] The regeneration step gives rise to a first generation transgenic plant. The invention also provides methods of obtaining transgenic plants of further generations from this first generation plant. These are known as progeny transgenic plants. Progeny plants of second, third, fourth, fifth, sixth and further generations may be obtained from the first generation transgenic plant by any means known in the art.

[0194] Thus, the invention provides a method of obtaining a transgenic progeny plant comprising obtaining a second-generation transgenic progeny plant from a first-generation transgenic plant of the invention, and optionally obtaining transgenic plants of one or more further generations from the second-generation progeny plant thus obtained.

[0195] Progeny plants may be produced from their predecessors of earlier generations by any known technique. In particular, progeny plants may be produced by: (a) obtaining a transgenic seed from a transgenic plant of the invention belonging to a previous generation, then obtaining a transgenic progeny plant of the invention belonging to a new generation by growing up the transgenic seed; and/or (b) propagating clonally a transgenic plant of the invention belonging to a previous generation to give a transgenic progeny plant of the invention belonging to a new generation; and/or (c) crossing a first-generation transgenic plant of the invention belonging to a previous generation with another compatible plant to give a transgenic progeny plant of the invention belonging to a new generation; and optionally (d) obtaining transgenic progeny plants of one or more further generations from the progeny plant thus obtained.

[0196] These techniques may be used in any combination. For example, clonal propagation and sexual propagation may be used at different points in a process that gives rise to a transgenic plant suitable for cultivation. In particular, repetitive back-crossing with a plant taxon with agronomically desirable characteristics may be undertaken. Further steps of removing cells from a plant and regenerating new plants therefrom may also be carried out.

[0197] Also, further desirable characteristics may be introduced by transforming the cells, plant tissues, plants or seeds, at any suitable stage in the above process, to introduce desirable coding sequences other than the polynucleotides of the invention. This may be carried out by the techniques described herein for the introduction of polynucleotides of the invention.

[0198] For example, further transgenes may be selected from those coding for other herbicide resistance traits, e.g. tolerance to: Glyphosate (e.g. using an EPSP synthase gene (e.g. EP-A-0,293,358) or a glyphosate oxidoreductase (WO 92/00377) gene); or tolerance to fosametin; a dihalobenzonitrile; glufosinate, e.g. using a phosphinothrycin acetyl transferase (PAT) or glutamine synthase gene (cf. EP-A-0,242,236); asulam, e.g. using a dihydropteroate synthase gene (EP-A-0,369,367); or a sulphonylurea, e.g. using an ALS gene); diphenyl ethers such as acifluorfen or oxyfluorfen, e.g. using a protoporphyrogen oxidase gene); an oxadiazole such as oxadiazon; a cyclic imide such as chlorophthalim; a phenyl pyrazole such as TNP, or a phenopylate or carbamate analogue thereof.

[0199] Similarly, genes for beneficial properties other than herbicide tolerance may be introduced. For example, genes for insect resistance may be introduced, notably genes encoding Bacillus thuringiensis (Bt) toxins. Likewise, genes for disease resistance may be introduced, e.g. as in WO91/02701 or WO95/06128.

[0200] Typically, a protein of the invention is expressed in a plant of the invention. Depending on the promoter used, this expression may be constitutive or inducible. Similarly, it may be tissue- or stage-specific, i.e. directed towards a particular plant tissue (such as any of the tissues mentioned herein) or stage in plant development.

[0201] The invention also provides methods of obtaining crop products by harvesting, and optionally processing further, transgenic plants of the invention. By crop product is meant any useful product obtainable from a crop plant.

### Products That Contain Mutant Gluten Proteins or Proteins That Comprise Sequence Capable of Acting as an Antagonist

[0202] The invention provides a product that comprises the mutant gluten proteins or protein that comprises sequence capable of acting as an antagonist. This is typically derived from or comprise plant parts from plants mentioned herein which express such proteins. Such a product may be obtainable directly by harvesting or indirectly, by harvesting and further processing the plant of the invention. Directly obtainable products include grains. Alternatively, such a product may be obtainable indirectly, by harvesting and further processing. Examples of products obtainable by further processing are flour or distilled alcoholic beverages; food products made from directly obtained or further processed material, e.g. baked products (e.g. bread) made from flour. Typically such food products, which are ingestible and digestible (i.e. non-toxic and of nutrient value) by human individuals.

[0203] In the case of food products that comprise the protein which comprises an antagonist sequence the food product may also comprise the wild-type gluten protein, but preferably the antagonist is able to cause a reduction (e.g. completely) in the coeliac disease symptoms after such food is ingested.

### Deamidation

[0204] Where a sequence described herein includes a Gln residue, the invention also provides that sequence where the Gin residue has been deamidated to a Glu residue. One or more (e.g., 1, 2, 3, 4, 5, etc.) Gin residue(s) per sequence may be deamidated, but when there is more than one Gin residue, not all of them must be deamidated. Preferably, the Gln residues that are deamidated are those susceptible to deamidation by transglutaminase.

[0205] Examples where Gin may be deamidated are given in the sequence listing. For example, residue 4 of SEQ ID NO: 1 can be a Gin residue or a Glu residue, residue 6 of SEQ ID NO:2 can be a Gln residue or a Glu residue, residues 4 and 7 of SEQ ID NO:6 can each independently be Gln or Glu residues, etc. The Gin residues that are susceptible to deamidation, and their deamidated Glu counterparts, are referred to as “Glx” residues.

[0206] Where the agent includes more than one Glx residue, these may be arranged in any configuration. For example, the Glx residues may be consecutive residues, and/or may be separated by one or more (e.g., 1, 2, 3, 4, 5, 6, 7, 8, etc.) other residues. As mentioned above, for HLA-DQ8 epitopes, the agent preferably comprises a Glx residue that is separated by seven residues from another Glx residue.

[0207] Preferred agents of the invention are deamidated agents, i.e., the agent comprises the one or more Glx residues in the Glu form. This can be achieved in various ways, e.g., by including Glu residues during production, or by converting Gln residues to Glu by deamidation. Conversion of Gln to Glu can be achieved by treating an agent that contains Gln residues that are susceptible to deamidation with a deamidating agent. The one or more Gin residues are preferably deamidated to Glu by transglutaminase, for example as described in the examples.

[0208] The skilled person will be able to determine which particular Gln residues in the agent are susceptible to deamidation and thus which residues should be Glu residues arising from deamidation of a Gln residue. For example, Gln-containing sequences susceptible to deamidation by transglutaminase generally conform to a motif: e.g., QXPX, QXPF (Y), QXX (FYMILVW), QXPF, QXX (FY), PQ (QL) P (FY) P. For example, the sequence PQ (QL) P (FY) P facilitates deamidation of the underlined Q at position 2 by transglutaminase.

[0209] In particular, agents comprising the deamidated versions of SEQ ID NOs: 1-1927 are preferred (where such sequences are not already deamidated). Most preferably, the agents of the invention comprise the transglutaminase-deamidated versions of SEQ ID NOs: 1-1927 (again, where not already deamidated). Analogues and equivalents of these agents, as defined herein, are also encompassed within the scope of the invention.

### EXAMPLES

[0210] The invention is illustrated by the following nonlimiting Examples:

### Initial Gliadin Epitope Screening Library

[0211] In initial experiments involving 29 HLA-DQ2+ individuals with coeliac disease on long-term gluten free diet, interferon-gamma ELISPOT assays were used to screen a previous Pepset (described in WO 03/104273, which is incorporated herein by reference) initially as pools of peptides and then in 15 subjects as individual peptides with and without deamidation by tTG. This Pepset library consisted of 652 20mer gliadin peptides spanning all unique 12mers contained within all Genbank entries described as wheat gliadins found in September 2001. This Pepset library was designed “manually” from gene-derived protein sequences aligned using ClustalW software (MegAlign) arranged into phylogenetic groupings.

[0212] Approximately 0.6 micromole of each of 652 of the 20mers was provided. Two marker 20mer peptides were included in each set of 96 (VLQQHNIAHGSSQVLQESTY—peptide 161, and IKDFHVYFRESRDALWKGPG) and were characterized by reverse phase-HPLC and amino acid sequence analysis. Average purities of these marker peptides were 19% and 50%, respectively. Peptides were initially dissolved in acetonitrile (10%) and Hepes 100 mM to 10 mg/ml. The final concentration of individual peptides incubated with PBMC for the IFNγ ELISpot assays was 20 mcg/ml. These peptides were deamidated by incubation with guinea pig tissue tTG (Sigma T5398) in the ratio 100:32 mcg/ml for two hours at 37° C. Peptides solutions were stored at −20° C. and freshly thawed prior to use. These studies were conducted in Oxford, UK. ELIspot assays were performed as described for those conducted in Melbourne, Australia (all other studies described herein). “Oxford” data regarding subject responses to individual peptides was pooled with “Melbourne” data for subsequent “minimal” epitope analysis in the “EM algorithm” (see below).

### Second Round Gliadin Epitope Screening Library

[0213] A second round gliadin epitope library was designed according the bioactive sequences identified from the initial gliadin epitope screening library of 652 20mers. Gliadin 20mers with mean bioactivity equivalent to >5% of the most potent gliadin 20mer (91: PQPFPPQLPYPQPQLPYPQP) in 15 HLA-DQ2+ subjects assessed with all 652 deamidated 20mers were defined. Since earlier studies (see WO 03/104273) indicated that deamidated pools of this Pepset were more potent than without deamidation, glutamine residues within bioactive 20mers potentially deamidated by tTG were identified according to the motif QXPX, QXZ (FYWILVM) where x is any amino acid except proline, and P is proline, Z is any amino acid, and FYWILVM represent hydrophobic amino acids (consistent with the motifs for tTG-mediated deamidation published by Vader W. et al J Exp Med 2002 J Exp. Med. 195:643-649, PCT WO 03/066079, and Fleckenstein B. 2002. J Biol Chem 277:34109-16).

[0214] 12mer peptides were then identified in which each potential deamidation site could be in position 4, 6 or 7 in the 9mer located within HLA-DQ2 binding groove (HLA-DQ2 anchors at these positions show a preference for glutamate). Candidate 12mer core epitope sequences were then flanked with glycine followed by the N-terminal residue present in the parent gliadin polypeptide and at the C-terminal by the C-terminal residue present in the parent gliadin polypeptide followed by glycine (i.e. GXXXXXXXQXXXXXXG).

[0215] Peptides were synthesised with glutamine or glutamate in position 9. Peptides (100 mcg/ml) (+/−deamidation by tTG) were then assessed in interferon gamma ELISPOT assays using PBMC from 15 HLA-DQ2+ coeliac volunteers after gluten challenge. Results of these assays were analysed according to the EM algorithm (see below). In addition, the most potent distinct peptides were synthesised and purified to >80% (Mimotopes) and assessed in interferon gamma ELISPOT assays using PBMC from 15 HLA-DQ2+ coeliac volunteers after wheat gluten challenge.

### Complete Gluten Epitope Screening Library

[0216] To make practical the design of a substantially larger peptide library spanning all wheat gliadin and glutenin, rye, barley, and oat gluten-like proteins (prolamines), and to confirm data from the previous gliadin peptide library, an iterative algorithm was developed to automate design of a minimal set of 20mers including all unique 12mers (excluding signal peptide sequences) in gluten proteins. The ScanSet algorithm is shown in FIG. 1.

[0217] The method tests for all possible peptide epitopes from a group of proteins whether they are potential antigens in a range of patients. T-cell epitopes range in size between 9 and 15 AA. To test all possible 12mers in a set of proteins, becomes quickly unfeasible because of the high numbers.

[0218] Here we use the fact that, for example, a 20mer peptide can cover up to 9 different 12mers. We therefore developed a combinatorial approach to cover all possible 12mers represented in a family of proteins.

[0219] 20 amino acid (20mer) long peptides are generated that are tested as antigens, and that cover all 12mer peptide sequences that exist in the group of proteins. We define the length of peptides to generate as L (e.g. 20) and the length of the epitopes we want to cover as S. We developed a computer program that generates all uniquely occurring Lmers from a set of proteins. Further, we generate all uniquely occurring Smers from this set of proteins. Next we select a set of NLmers that contains all sequences of Lmers. FIG. 1 outlines how this algorithm works.

[0220] On 16 Jun. 2003, Genbank contained accession numbers for 53 alpha/beta, 53 gamma and 2 omega gliadins, and 77 LMW and 55 HMW glutenins from T. aestivum, 59 hordeins, 14 secalins, and 20 avenins (see FIG. 2). In total, ScanSet identified 18117 unique 12mers contained in the 225 gluten gene products.

[0221] All unique gluten 12mers could be subsumed in 2922 20mers. These 20mers were synthesised in a Pepset peptide library (Mimotopes Inc., Melbourne, Australia). Pepset peptides were synthesized in batches of 96 (Mimotopes Inc., Melbourne Australia). Approximately 0.7 to 1.3 micromole of each of 2922 20mers was provided. Two marker 20mer peptides were included in each set of 96 (one representative peptide from the 94 other peptides on each particular plate, and IKDFHVYFRESRDALWKGPG) and were characterized by reverse phase-HPLC and mass spectroscopy. Average purities of these marker peptides were 36% (range: 5-68%) and 64% (range:55-71%), respectively.

[0222] Peptides were initially dissolved in aqueous acetonitrile (50%). Peptides in aqueous acetontrile were transferred to sterile 96-well plates and diluted in sterile PBS with 1 mM calcium (250 mcg/ml) and then incubated with tTG (25 mcg/ml) (Sigma T5398) for 6 h 37° C. and then stored frozen (−20° C.) until use.

[0223] Subjects all had biopsy-proven coeliac disease and had followed a strict gluten free diet for at least 6 months. All subjects possessed HLA-DQB01*02 (HLA-DQ2) alone (n=100) or HLA-DQA1*03 and HLA-DQB1*0302 (HLA-DQ8) alone (n=5). In all cases, tTG-IgA was assessed before gluten challenge and was in the normal range (30% of initial volunteers were found to have elevated tTG4gA and were excluded since chronic gluten exposure is associated with failure to induce peripheral blood gluten-specific T-cells by short-term gluten challenge). Volunteers consumed Baker's Delight “white bread block loaf” (200 g daily for three days) or Uncle Toby's oats (100 g daily for three days). All but three subjects completed the three day challenge (one withdrew after first mouthful of bread, and the other two vomited after initial two slices of bread. Data from the latter two were included in subsequent analysis). Blood (300 ml) was drawn six days after commencing gluten challenge. Gluten peptide-specific IFNγ ELISpot responses have not been found in our previous studies, and so “pre-challenge” blood was not assessed in this set of experiments (Anderson, R P et al 2000. Nat. Med. 6:337-342., WO 01/25793, WO 03/104273).

[0224] IFNγ ELISpot assays (Mabtech, Sweden) were performed in 96-well plates (MAIP S-45, Millipore) in which each well contained 25 mcl of peptide solution and 100 mcl of PBMC (2-8×10⁵/well) in RPMI containing 10% heat inactivated human AB serum. After development and drying, IFNγ ELISpot plates were assessed using the MAIP automated ELISpot plate counter. Data was then analysed according to a novel algorithm (Expectation Maximization: EM) to define and quantify interferon-gamma responses to 9mer sequences contained within the peptide library (see FIG. 3 and below). 9mer peptides were then rationalised according to an algorithm that assumes redundancy in T-cell recognition, the “IterativeCluster” algorithm (see FIG. 4 and below), by allowing groups of amino acids with similar chemical properties at any one position in the 9mer, or for glutamate to replace glutamine at any position (assuming deamidation may have occurred).

[0225] Since there were data sets from only two HLA-DQ8+ individuals who were not also HLA-DQ2+, and these were utilizing only the 721 wheat gliadin 20mers from the “Complete gluten epitope screening library”, bioactive peptides were identified by taking the average rank of peptide-specific IFNγ ELISPOT responses in the two subjects. For prediction of likely HLA-DQ8-restricted gliadin epitopes, it was assumed that a glutamine residue susceptible to tTG-mediated deamidation occupied either position 1 or 9 in potential 9mer core regions of epitopes, consistent with the HLA-DQ8 binding motif and the findings of van de Wal et al (van de Wal, Y. et al 1998. J. Immunol. 161(4):1585-1588).

### Expectation Maximization (EM) Algorithm to Analyze Data From ELISpot:

[0226] FIG. 3 shows an algorithm to analyze data coming from an assay using the ELISpot. T-cell responses to different peptides are measured in 96 well plates using T-cell assays. Assays are performed on many patients using many different peptide antigens. The result of the T-cell assays can be summarized in a table where the rows represent peptides and the columns patients and the individual measurements (counts) are in the table (e.g., see FIG. 3B). The purpose of the EM algorithm is to differentiate between response and non response of a patient to a peptide and to estimate a mean rate of response and a proportion of people responding for each peptide.

[0227] Responses are measured for a number of different patients (i will be used to indicate the patient) and for many different peptides (j will be used to indicate the peptide). Each measurement (yij) represents a count of T-cells from patient i responding to peptide j. In order to estimate, whether a measurement for a certain peptide in a patient can be called a response or whether it is more likely to be coming from a background distribution, we propose a model for an incomplete data problem, with yij being the observed count of spots and zij an unobserved indicator, whether person i responds to peptide j.

[0228] The observed number of counts yij are modelled to come from independent Poisson distributions: poisson (αi, λj), if patient i is responding to peptide j, i.e. zij=1, and poisson (αi, λ0), if patient i is not responding to peptide j, i.e. zij=0.

[0229] Complete data: yij (observed counts), zij (response indicator, not observed).

[0230] Parameters: θ=(αi, λj, λ0, pj)
[0231] αi: Patients overall responsiveness.
[0232] λj: Peptide induced rate of response.
[0233] λ0: Background rate of response.
[0234] pj: Proportion of people responding to peptide j.
   EM algorithm:

[0235] Set variables initially to random values

[0236] E-step: compute likelihood

[0237] M-step: maximize likelihood function

[0238] Iterate E- and M-step

### Iterative Procedure to Find Minimal Set of Responsive Epitopes

[0239] A program to compute a minimal set of peptides for use in a vaccine based on the T-cell responses estimated in the EM algorithm was developed. We measured T-Cell responses to Lmers from a group of proteins. The peptides were generated to cover all possible Smers. We estimated the following parameters for the response by an EM algorithm: rate of response, number of people responding, proportion of people responding. The proportion of people responding multiplied with the estimated rate of response is used as a criterion to define epitopes which are good antigens. Many of the measured Lmers contain the same Smer epitopes. In order to find the epitopes (Smers) which can explain all the responses in Lmers we select the Smer which is contained in Lmers that in the mean have the highest responses. Then we remove all Lmers that contain this Smer from our measurements. Next we select the Smer with the highest responses in the remaining Lmers. We iterate this procedure until no Smers with responses higher than a specified cutoff exist. We use several iterations with different cutoffs. This process is sketched in FIG. 4. The such defined list of clustered Lmers can be used as a basis to define the optimal epitopes and select peptides that function as good antigens.

### HLA-DQ2 Epitopes in Wheat Gluten

[0240] HLA-DQ2 epitopes in wheat gliadins and glutenins were identified using PBMC collected on day 6 after commencing gluten challenge in a total of 76 HLA-DQ2+ individuals in gamma-interferon ELISPOT assays (Initial gliadin epitope library: n--15, Second round gliadin epitope screening library: n=15, Complete gluten epitope screening library: n=46). All data relating to individual peptide responses in coeliac subjects was pooled and analysed by the EM algorithm.

[0241] A series of 9mer sequences were identified and ordered according to the intensity of gamma-interferon responses and the proportion of individuals responding (see FIG. 5). Many of the sequences identified could be grouped in “superfamilies” allowing for several different amino acids with similar chemical properties to be present at any one position in the putative epitope (see FIG. 6). For example, in “Sequence 1” of FIG. 6 (SEQ ID NO: 1555) P (QR) P (QE) LP (FY) PQ, glutamine (Q) or arginine (R) are both accepted at position 2 except that Q generates a substantially more bioactive epitope.

[0242] By reviewing the 110 most “active” 9mer sequences identified by the EM algorithm, the “list” of 9mer motifs could be condensed to 41 9mers, many of which overlapped (for example “Sequence 1” and “2” (SEQ ID NOS: 1555 and 1558 respectively) overlap by 7 residues and are both present in A-gliadin 57-73 QE65). In selected cases, high-grade peptides were synthesised and confirmed the bioactivity of peptides identified by the EM algorithm (see FIG. 7).

### HLA-DQ2 Epitopes in Oats Avenins

[0243] Avenin peptides were assessed after challenge with oats (n=30 subjects) or after wheat bread (n=8) in HLA-DQ2+ coeliac subjects. ELISPOT responses were found for the peptides found in FIG. 8. One of the reactive avenin peptides was homologous to a sequence in wheat gluten (SEQ ID NO: 1590).

### Oats (Avenin) High Quality Peptide Studies

[0244] High grade avenin peptides were assessed 3 days after completing oats challenge with pure wheat-free oats, 100 g/d for 3 days (“day 6” PBMC interferon gamma ELISPOT responses). These peptides were designed upon peptides previously defined using the screening grade (“first round”) avenin peptide library and on potential deamidation sites. There were 25 peptides (as 16mers) with purity verified by HPLC as >80%, and sequences confirmed by mass spectroscopy.

[0245] Interferon gamma ELISPOT responses to the high grade avenin peptides following deamidation by tTG were compared in 18 subjects with DQ2+ coeliac disease.

[0246] The dominant (>70% maximal response) peptides after oats challenge included: EQQFGQNIFSGFSVQL (SEQ ID NO: 1764) (11/18 subjects), QLRCPAIHSVVQAIIL (SEQ ID NO: 1765) (4/18 subjects), and QYQPYPEQEQPILQQQ (SEQ ID NO: 1766) (3/18 subjects). 2/18 subjects did not have avenin specific responses (defined by SFU (spot forming units) >3× blank) and 6/18 subjects mean maximal SFU were less than 10. Two additional peptides elicited positive responses: QIPEQLRCPAIHSVVQ (SEQ ID NO: 1767) (3/18 subjects) and EQYQPEQQPFMQPL (SEQ ID NO: 1768) (>40% maximal peptide response in 5/18 subjects). The panel of 25 peptides included several peptides similar to peptide 1490 (SEQYQPYPEQQEPFVQ) reported in Arentz-Hansen, PLoS Medicine (October 2004, vol. 1, issue 1 (84-92), however, that peptide induced a strong positive response in only one subject, and far weaker response in 5 subjects.

[0247] Interferon gamma ELISPOT responses to high grade avenin peptides were absent prior to gluten challenge, and were blocked by pre-treatment of PBMC with anti-HLA DQ but not anti-HLA DR antibody.

### Rye and Barley Screening Peptide Libraries

[0248] Secalin and hordein 20mer first round peptide libraries were assessed 3 days after completing rye (bread, 100 g/d for 3 days) or barley (boiled, 100 g/d for 3 days) challenge (“day 6” PBMC interferon gamma ELISPOT responses). Although iterative analysis using 2nd and 3rd round peptide libraries to define epitopes has not yet been performed, the 20mers pre-treated with tTG found to induce “potent” responses shared substantial structural similarity to the bioactive peptides identified after wheat challenge. However, the dominant peptide sequences after rye or barley challenge did not include peptides with the PQPQLPY sequence found to be dominant after wheat challenge. The dominant (>70% maximal response) 20mer after rye challenge was usually PQQLFPLPQQPFPQPQQPFP (SEQ ID NO: 1769) (8/14 subjects), or occasionally QPFPQPQQPTPIQPQQPFPQ (SEQ ID NO: 1770) (4/14), QQPQQLFPQTQQSSPQQPQQ (SEQ ID NO: 1771) (1/14), PQTQQPQQPFPQPQQPQQLF (SEQ ID NO: 1772) (1/14) and/or QEQREGVQILLPQSHQQLVG (SEQ ID NO: 1773) (1/14). Additional peptides noted for greater than 40% maximal response in at least 1 subject include:

(SEQ ID NO: 1774)

| | |
|---|---|
| FPQQPQQPFPQPQQQLPLQP | (3/14, 2>70%) |

(SEQ ID NO: 1775)

| | |
|---|---|
| PQQPFPQQPEQIIPQQPQQP | (5/14, 3>70%) |

(SEQ ID NO: 1776)

| | |
|---|---|
| QQLPLQPQQPFPQPQQPIPQ | (6/14, 2>70%) |

(SEQ ID NO: 1777)

| | |
|---|---|
| QQPQQPFPLQPQQPVPQQPQ | (3/14, 1>70%) |

(SEQ ID NO: 1778)

| | |
|---|---|
| SIPQPQQPFPQPQQPFPQSQ | (4/14, 1>70%) |

(SEQ ID NO: 1779)

| | |
|---|---|
| QTQQSIPQPQQPFPQPQQPF | (3/14, 1>70%) |

(SEQ ID NO: 1780)

| | |
|---|---|
| NMQVGPSGQVEWPQQQPLPQ | (2/14, 1>70%) |

(SEQ ID NO: 1781)

| | |
|---|---|
| VGPSGQVSWPQQQPLPQPQQ | (2/14, 2>70%) |

(SEQ ID NO: 1782)

| | |
|---|---|
| QQPFLLQPQQPFSQPQQPFL | (1/14, 1>70%) |

(SEQ ID NO: 1783)

| | |
|---|---|
| FPLQPQQPFPQQPEQIISQQ | (5/14, 1>70%) |

(SEQ ID NO: 1784)

| | |
|---|---|
| PQQPQRPFAQQPEQIISQQP | (3/14, 1>70%) |

(SEQ ID NO: 1785)

| | |
|---|---|
| SPQQPQLPFPQPQQPFVVVV | (4/14, 1>70%) |

(SEQ ID NO: 1786)

| | |
|---|---|
| QQPSIQLSLQQQLNPCKNVL | (1/14, 1>70%) |

[0249] Typically, the dominant peptides after barley challenge included one of six peptide motifs, or were one of eight other individual 20mers “dominant” in only one of 17 subjects after barley challenge. The six motifs identified:

| | |
|---|---|
| QQPIPQQPQPY | (SEQ ID NO: 1787) |
| PFPQPQQPFPW | (SEQ ID NO: 1788) |
| LQPQQPFPQ | (SEQ ID NO: 1789) |
| PQPQQASPL | (SEQ ID NO: 1790) |
| IIPQQPQQPF | (SEQ ID NO: 1791) |
| YPEQPQQPF | (SEQ ID NO: 1792) |

[0250] The barley hordein peptides showing at least 40% maximal peptide response in at least one subject include the following, wherein an asterisk indicates the eight individual peptides showing maximal response in a single individual:

(SEQ ID NO: 1793)

| | |
|---|---|
| QQQPFPQQPIPQQPQPYPQQ | (8/17, 2>70%) |

(SEQ ID NO: 1794)

| | |
|---|---|
| QQPQPFSQQPIPQQPQPYPQ | (9/17, 8>70%) |

(SEQ ID NO: 1795)

| | |
|---|---|
| PQQPVPQQPQPYPQQPQPFP | (5/17, 1>70%) |

(SEQ ID NO: 1796)

| | |
|---|---|
| PQPFPQQPTPQQPQPYPQQP | (6/17, 2>70%) |

(SEQ ID NO: 1797)

| | |
|---|---|
| YPQQPQPFPQQPTPQQPQPY | (6/17, 2>70%) |

(SEQ ID NO: 1798)

| | |
|---|---|
| QPQPYPQQPQPYPQQPFQPQ | (7/17, 2>70%) |

(SEQ ID NO: 1799)

| | |
|---|---|
| QPQQPQPFPQQPVPQQPQPY | (5/17, 2>70%) |

(SEQ ID NO: 1800)

| | |
|---|---|
| PQPYPQQPQPFPQQPPFCQQ | (1/17, 1>70%)* |

(SEQ ID NO: 1801)

| | |
|---|---|
| QPFPQPQQPFPWQPQQPFPQ | (10/17, 2>70%) |

(SEQ ID NO: 1802)

| | |
|---|---|
| PFPQQPQQPFPQPQQPFRQQ | (6/17, 3>70%) |

(SEQ ID NO: 1803)

| | |
|---|---|
| WQPQQPFPQPQQPFPLQPQQ | (9/17, 5>70%)* |

(SEQ ID NO: 1804)

| | |
|---|---|
| PWQPQQPFPQPQEPIPQQPQ | (1/17, 1>70%) |

(SEQ ID NO: 1805)

| | |
|---|---|
| QQPFPQPQQPIPYQPQQPFN | (5/17, 1>70%) |

(SEQ ID NO: 1806)

| | |
|---|---|
| PQQPQQPFPQPQQPFSWQPQ | (6/17, 2>70%)* |

(SEQ ID NO: 1807)

| | |
|---|---|
| QPQQPFPQPQQPIPYQPQQP | (4/17, 1>70%)* |

(SEQ ID NO: 1808)

| | |
|---|---|
| QSQQQFPQPQQPFPQQPQQP | (1/17, 0>70%) |

(SEQ ID NO: 1809)

| | |
|---|---|
| PFPQPQQPFSWQPQQPFLQP | (1/17, 0>70%) |

(SEQ ID NO: 1810)

| | |
|---|---|
| FPQPQEPFPQQPQQPFPLQP | (1/17, 0>70%) |

(SEQ ID NO: 1811)

| | |
|---|---|
| PFPQPQQPFPWQPQQPFPQP | (6/17, 0>70%) |

(SEQ ID NO: 1812)

| | |
|---|---|
| FPQYQIPTPLQPQQPFPQQP | (2/17, 1>70%) |

(SEQ ID NO: 1813)

| | |
|---|---|
| FPLQPQQPFPQQPQQPFPQQ | (1/17, 0>70%) |

(SEQ ID NO: 1814)

| | |
|---|---|
| QQPFPLQPQQPFPQPQPFPQ | (1/17, 0>70%) |

(SEQ ID NO: 1815)

| | |
|---|---|
| SPLQPQQPFPQGSEQIIPQQ | (1/17, 0>70%) |

(SEQ DNO: 1816)

| | |
|---|---|
| PQQASPLQPQPQQASPLQPQ | (1/17, 1>70%) |

(SEQ ID NO: 1817)

| | |
|---|---|
| PQQPPFWPQQPFPQQPPFGL | (1/17, 1>70%)* |

(SEQ ID NO: 1818)

| | |
|---|---|
| PVLSQQQPCTQDQTPLLQEQ | (1/17, 1>70%) |

(SEQ ID NO: 1819)

| | |
|---|---|
| RQLPKYIIPQQPQQPFLLQP | (1/17, 1>70%) |

(SEQ ID NO: 1820)

| | |
|---|---|
| QGSEQIIPQQPQQPFPLQPH | (7/17, 3>70%)* |

(SEQ ID NO: 1821)

| | |
|---|---|
| PQGSEQIIPQQPFPLQPQPF | (2/17, 1>70%) |

(SEQ ID NO: 1822)

| | |
|---|---|
| QPFPTPQQFFPYLPQQTFPP | (4/17, 1>70%) |

(SEQ ID NO: 1823)

| | |
|---|---|
| PFPQPPQQKYPEQPQQPFPW | (1/17, 1>70%) |

(SEQ ID NO: 1824)

| | |
|---|---|
| QKYPEQPQQPFPWQQPTIQL | (1/17, 1>70%) |

(SEQ ID NO: 1825)

| | |
|---|---|
| FQQPQQSYPVQPQQPFPQPQ | (3/17, 1>70%) |

(SEQ ID NO: 1826)

| | |
|---|---|
| QIPYVHPSILQQLNPCKVFL | (1/17, 1>70%) |

(SEQ ID NO: 1827)

| | |
|---|---|
| LAAQLPAMCRLEGGGGLLAS | (1/17, 1>70%) |

(SEQ ID NO: 1828)

| | |
|---|---|
| PYLPEELSPQYQIPTPLQPQ | (1/17, 1>70%)* |

(SEQ ID NO: 1829)

| | |
|---|---|
| VSPHPGQQTTVSPHQGQQTT | (1/17, 1>70%)* |

### Second and Third Round Wheat Glutenin and Gliadin Peptide Libraries

[0251] The second round wheat gliadin and glutenin library was designed upon the sequences of 20mer wheat gliadin and glutenin peptides that induced at least 5% of the response (interferon gamma ELISPOT) stimulated by the most active transglutaminase (tTG) pre-treated (enzymatically deamidated) 20mer peptide in any subject. All 2nd round 16mer peptides were assessed in at least 18 subjects. The 2nd round library generated from the “Oxford” gliadin 20mer library had been assessed in ten subjects—this data was merged with data generated from the 18 subjects used to assess the new 2nd round (expanded) gliadin/glutenin library. Hence, individual 16mer peptides pre-treated with transglutaminase were assessed in either 18 (novel gliadin/glutenin sequences based on “Melbourne” 20mer library) or 28 subjects (gliadin sequences based on “Oxford” 20mer library). All 16mers identified for the second round Oxford library also fulfilled the selection criteria for the Melbourne second round library.

[0252] The second round peptide library data was analysed according to the “dominance” of peptide responses in the interferon gamma ELISPOT in individual subjects i.e. the percent response of an individual's PBMC to a specific peptide normalized against that individual's maximal peptide-induced response. Sequences of peptides that stimulated at least 40% of the maximal peptide-specific response in at least one subject are shown in Table 1 below. The dataset supports the consistency and “dominance” of peptides conforming to the sequences identified using the first round 20mer peptide library using the Expectation Maximization (EM) algorithm described above.

TABLE 1

Peptides confirmed in Second Round Library
as at least 40% as active as the peptide
with maximal activity in any one subject:
Ranked according to potency ofpeptide family

| | SEQ | | | | |
|---|---|---|---|---|---|
| | ID | | | | |
| Peptide | NO: | >70% | 40-70% | 10-40% | <10% |
| G-QLPYPQPQLPYPQP-G | 1830 | 18/28 | 4/28 | 3/28 | 3/28 |
| G-LQPFPQPQLPYPQP-G | 1831 | 14/28 | 8/28 | Nil | 6/28 |
| G-LQPFPQPQLPFPQP-G | 1832 | 4/28 | 8/28 | 5/28 | 10/28 |
| G-LQPFPQPQLPYLQP-G | 1833 | 1/28 | 1/28 | 12/28 | 14/28 |
| G-LQPFPQPQLPYSQP-G | 1834 | 2/28 | 3/28 | 12/28 | 11/28 |
| G-LQPFPQPQLSYSQP-G | 1835 | Nil | 1/28 | 2/28 | 25/28 |
| G-QQPFPQPQQPFPWQ-G | 1837 | 9/28 | 8/28 | 5/28 | 6/28 |
| G-QQPFPQPQQPIPVQ-G | 1838 | 8/28 | 5/28 | 7/28 | 8/28 |
| G-QQPFPQPQQPFSQQ-G | 1839 | 4/28 | 7/28 | 8/28 | 9/28 |
| G-QQPFPQPQQPFCQQ-G | 1840 | 2/28 | 2/28 | 13/28 | 11/28 |
| G-GLERPWQQQPLPPQ-G | 1841 | 2/18 | 1/18 | Nil | 15/18 |
| G-QTFPHQPQQAFPQP-G | 1842 | 1/28 | 2/28 | Nil | 25/28 |
| LQQQCSPVAMPQRLAR | 1843 | 1/28 | 1/28 | 11/28 | 15/28 |
| QGQQGYYPISPQQSGQ | 1844 | 1/18 | 1/18 | 1/18 | 15/18 |
| PGQGQSGYYPTSPQQS | 1845 | 1/18 | 1/18 | Nil | 16/18 |
| QGQPGYYPTSPQQIGQ | 1846 | 1/18 | 1/18 | 1/18 | 15/18 |
| GQGQSGYYPTSPQQSG | 1847 | 1/18 | Nil | 2/18 | 15/18 |
| QQGYYPTSPQQSGQGQ | 1848 | Nil | 1/18 | Nil | 17/ |
| QGQQGYYPTSPQQPPQ | 1849 | Nil | 1/18 | Nil | Nil |
| QQGYYPISPQQLGQGQ | 1850 | Nil | 1/18 | Nil | Nil |
| YVPPDCSTINVPYANI | 1851 | 1/18 | 1/18 | 1/18 | 15/18 |
| IIMQQEQQEQRQGVQI | 1852 | 1/28 | Nil | 8/28 | 19/28 |
| VAHAIIMHQQQQQQQE | 1853 | Nil | 1/28 | 2/28 | 25/28 |
| G-QPIPQQPQQPFPLQ-G | 1854 | 1/28 | Nil | 5/28 | |
| G-FPQLQQPQQPFPQQ-G | 1855 | 1/28 | Nil | 1/28 | 26/28 |
| G-FPQTQQPQQPFPQQ-G | 1856 | Nil | 1/28 | 2/28 | 25/28 |
| G-QPLSQQPQQTFPQQ-G | 1857 | Nil | 1/28 | Nil | 27/28 |
| G-QQPQQQPQQPFPQQ-G | 1858 | Nil | 1/28 | 5/28 | 22/28 |
| G-FPQPQQPQQPFPQQ-G | 1859 | Nil | 1/28 | 3/28 | 25/28 |
| G-FPQPQQPQQSFPQQ-G | 1860 | Nil | 1/28 | 1/28 | 26/28 |
| G-QPQQTFPQQPQLPF-G | 1861 | 1/18 | Nil | 2/18 | 15/18 |
| G-MQVDPSGQVQWPQQ-G | 1862 | 1/18 | Nil | Nil | 17/18 |
| G-IQVDPSGQVQWPQQ-G | 1863 | 1/18 | Nil | Nil | 17/18 |
| G-MQADPSGQVQWPQQ-G | 1864 | 1/18 | Nil | Nil | 17/18 |
| G-MQVDPSSQVQWPQQ-G | 1865 | 1/18 | Nil | Nil | 17/18 |
| G-QQEQQILQQILQQQ-G | 1866 | 1/18 | Nil | Nil | 17/18 |
| VPLYRTTTSVPFGVGT | 1867 | 1/18 | Nil | Nil | 17/18 |
| LQTLPSMCNVYIPPYC | 1868 | 1/18 | Nil | Nil | 17/18 |
| LALQTLPAMCNVYIPP | 1869 | 1/18 | Nil | Nil | 17/18 |
| DAIRAIIYSIVLQEQQ | 1870 | 1/18 | Nil | Nil | 17/18 |
| G-QQQFSQPQQQFPQP-G | 1871 | Nil | 5/28 | 7/28 | 16/28 |
| G-FFPQPQQQFPQPQQ-G | 1872 | Nil | 1/28 | 10/28 | 17/28 |
| G-FPQQPQQQFPQPQQ-G | 1873 | Nil | 1/28 | Nil | 27/28 |
| G-QQPFPQPQQQFPQP-G | 1874 | Nil | 1/28 | 12/28 | 15/28 |
| G-QPQPFLPQLPYPQP-G | 1875 | Nil | 4/28 | 9/28 | 15/28 |
| G-QQPFPQPQQQLPQP-G | 1876 | Nil | 3/28 | 6/28 | 19/28 |
| G-LPFPQQPQQPLPQP-G | 1877 | Nil | 2/18 | 4/18 | 12/18 |
| G-QQAFPQPQQTFPHQ-G | 1878 | Nil | 3/28 | 8/28 | 17/28 |
| G-QQPFTQPQQPTPIQ-G | 1879 | Nil | 1/28 | 4/28 | 23/28 |
| G-QQIFPQPQQTFPHQ-G | 1880 | Nil | 1/28 | 10/28 | 17/28 |
| G-QQQFIQPQQPFPQQ-G | 1881 | Nil | 2/28 | 11/28 | 15/28 |
| G-QPFPLQPQQPFPQQ-G | 1882 | Nil | 2/28 | 7/28 | 19/28 |
| G-QPFPWQPQQPFPQQ-G | 1883 | Nil | 2/28 | 8/28 | 18/28 |
| G-QPTPIQPQQPFPQQ-G | 1884 | Nil | 2/28 | 5/28 | 21/28 |
| G-QVSFQQPQQQYPSP-G | 1885 | Nil | 2/28 | 4/28 | 22/28 |
| G-FFQQPQQQYPSSQQ-G | 1886 | Nil | 1/28 | 1/28 | 26/28 |
| G-GKSQVLQQSTYQLL-G | 1887 | Nil | 2/18 | 1/18 | 15/18 |
| GQVVNNHGQTVFNDIG | 1888 | Nil | 1/18 | 4/18 | |
| G-QPQLPFPQQPQQQF-G | 1889 | Nil | 1/28 | 2/28 | 25/28 |
| G-QPFPQPQQAQLPFP-G | 1890 | Nil | 1/28 | 2/28 | 25/28 |
| G-HQQPGQRQQGYYPT-G | 1891 | Nil | 1/18 | 1/18 | 16/18 |
| G-HQQFPQQQIPVVQP-G | 1892 | Nil | 1/18 | 1/18 | 16/18 |
| LEAVTSIALRTLPTMC | 1893 | Nil | 1/18 | 1/18 | |
| G-QQPQFSQQQQIPVI-G | 1894 | Nil | 1/18 | Nil | 17/18 |

[0253] The third round peptide library consisted of 74 peptides based upon structurally distinct sequences in the second round library found to induce at least 10% of the maximal response to any peptide in any subject. These peptides corresponded to wild-type (non-deamidated) sequences virtually identical to those used in the second round library. The distinct feature of this library was that it consisted of peptides with purity verified by HPLC as >80%, and with sequences confirmed by mass spectroscopy.

[0254] Interferon gamma ELSIPOT responses to the 3rd round library peptides following deamidation by tTG were compared in 14 subjects. Once again, sequences including the PQPQLPY motif were “dominant” in 9/14 subjects. However PFPQPQQPFPW (SEQ ID NO: 1895) stimulated >70% of maximal response in 1/14 subjects, PFPQQPQQPFPQ (SEQ ID NO: 1896) in 1/14, PQPFLPQLPYPQP (SEQ ID NO: 1897) in 1/14, QPFPQPQQPQQP (SEQ ID NO: 1898) in 4/14 (including 3 subjects in whom PQPQLPY peptides were not potent epitopes) SGQGVSQSQQQSQQQ (SEQ ID NO: 1899) in 2/14 (including one in which PQPQLPY peptides were not potent), QYEVIRSLVLRTLPNM (SEQ ID NO: 1900) and GLARSQMLQQSICHVG (SEQ ID NO: 1901) each in one (the same) subject in whom PQPQLPY peptides were not potent epitopes, RTTTSVPFGVGTGVGA (SEQ ID NO: 1902) in 1/14 subjects and AIHTVIHSIIMQQEQQ (SEQ ID NO: 1903) in 1/14 subjects.

[0255] Many of the sequences tested in third round were structurally related and individual subject's responses were present or absent according to the “relatedness” of certain sequences, suggesting redundancy of peptides recognized by gluten specific T cells induced by in vivo gluten challenge.

[0256] Interferon gamma ELISPOT responses to 3rd round peptides were absent before gluten challenge, and were blocked by pre-treatment of PBMC with anti-HLA DQ but not HLA DR antibody.

### Combitopes

[0257] The issue of epitope redundancy and the potential utility in diagnostics and therapeutics of peptides designed to combine “unique” dominant epitopes was addressed by comparing interferon gamma ELISPOT responses after wheat (n=16 HLA DQ2 coeliac disease subjects), rye (n=17) or barley (n=13) challenge to the sequences: QLQPFPQPELPYPQPQL (SEQ ID NO: 1904) (“P04724E”), QPEQPFPQPEQPFPWQP (SEQ ID NO: 1905) (“626fEE”), and QLQPFPQPELPYPQPFPQQPEQPFPQPEQPFPWQP (SEQ ID NO: 1906) (“Combitope”). After rye and barley challenge the sum of the median ELISPOT responses (spot forming units) to P04724E and 626fEE were almost identical (99%, and 102%, respectively) to the response to a similar (optimal) concentration of the Combitope. However, after wheat challenge (n=16 subjects), median P04724E response was 89% of that to Combitope, and median 626fEE responses was 70% of the response to Combitope. These findings would be consistent with substantial redundancy of these related epitope sequences, P04724E and 626fEE, after wheat challenge but not after rye or barley, and that combining dominant epitope sequences within longer peptides does not reduce their biological availability. Hence, combitopes derived from selected potent epitopes may be efficient delivery devices for T cell epitope-based therapeutics and diagnostics in coeliac disease.

### Epitopes in Wheat Gluten Associated With HLA-DQ8+ Coeliac Disease

[0258] Epitopes in wheat gliadins were identified using PBMC after gluten challenge in two individuals, one HLA-DQ8 homozygous, and one HLA-DQ8 heterozygote. Induced T-cell responses in other HLA-DQ8 (not DQ2) coeliac individuals responded weakly to gluten challenge and their data did not allow detailed analysis.

[0259] Deamidated 20mers including the core sequence: QGSFQPSQQ (SEQ ID NO: 1907), corresponding to the known HLA-DQ8-restricted alpha-gliadin epitope (in which Q1 and Q9 are deamidated by tTG for optimal activity), induced moderately strong peptide responses. However, a series of “core” peptides were associated with more potent responses in 20mers derived from gamma and omega gliadins (see FIG. 9). The most potent peptides possessed glutamine in a sequence that would suggest susceptibility to deamidation separated by seven residues from a second glutamine also susceptible to deamidation (as found in QGSFQPSQQ (SEQ ID NO: 1907)) suggesting that these deamidated sequences would become high affinity binders for HLA-DQ8 following deamidation by tTG. (The binding motif for HLA-DQ8 favours glutamate at positions 1 and 9.) A further group of 20mers possessed glutamine residues susceptible to deamidation but not separated by seven residues from a second glutamine susceptible to tTG-mediated deamidation.

### HLA DQ8 Coeliac Disease Gliadin and Glutenin Epitopes

[0260] Five subjects with coeliac disease that possess HLA DQ2 and HLA DQ8 alleles underwent wheat gluten challenge. PBMC from two subjects initially challenged were used to screen the first round “Melbourne” wheat gliadin 20mer library. The 20mer sequences identified using PBMC from these two HLA DQ8 CD subjects were dissected further by screening, in five HLA DQ8+ DQ2− CD subjects including the two original subjects, a second round library based on reactive 20mers in the ₁St round library. The ₂nd round library consisted of screening grade overlapping 16mers, and 13mers predicted to correspond to tTG-mediated deamidation products of epitopes with the potential for deamidation of glutamine at position 1 and/or position 9 (consistent with the HLA DQ8 peptide binding motif). In addition, the 1400 glutenin (HMW and LMW) tTG-pretreated 20mers in the “Melbourne” wheat gluten library were also screened in these five subjects.

[0261] The most potent and consistently dominant gliadin 16mers were the related sequences VYIPPYCTIAPFGIFG (SEQ ID NO: 1908) (3/5 subjects >70% response to maximal gliadin 16mer) and AMCNVYIPPYCAMAPF (SEQ ID NO: 1908) also dominant in 3/5 subjects (4/5 subjects produced dominant responses to one or both of these peptides). In addition, a series of peptides derived from previously identified bioactive 20mers whose responses in the ELISPOT were enhanced or permissive to specific glutamine residues being deamidated were identified: (QE)QPTPIQP(QE) (SEQ ID NO: 1909), (QE)QPFPLQP(QE) (SEQ ID NO: 1910), (QE)QPIPVQP(QE) (SEQ ID NO: 1911), (QE)QPQQPFP(QE) (SEQ ID NO: 1912), (QE)QP(QE)LPFP(QE) (SEQ ID NO: 1913), (QE)GSFQPSQ(QE) (SEQ ID NO: 1914) (previously published HLA DQ8 epitope, van der Wal 1998), (QE)LPFP(QE)QP(QE) (SEQ ID NO: 1915), and (QE)QPFP(QE)QP(QE) (SEQ ID NO: 1916).

[0262] Screening the glutenin 20mer library identified a further series of sequences that were dominant in at least one of the five subjects. Dominant 20mer peptides shared the motifs or had the sequences: PQQQQQQLVQQQ (SEQ ID NO: 1917), QGIFLQPH (LQ) I (AS) QLEV (SEQ ID NO: 1918), QPGQGQQG (HY) Y (SEQ ID NO: 1919), QSRYEAIRAII (FY) S (SEQ ID NO: 1920), RTTTSVPFD (SEQ ID NO: 1921), QPPFWRQQP (SEQ ID NO: 1922), Q(PS) (PS) (FI) (PS)QQQQ (SEQ ID NO: 1923), (QPLR)GYYPTSPQ (SEQ ID NO: 1924) previously identified HLA DQ8 epitope, van der Wal 2001), QGSYYPGQASPQ (SEQ ID NO: 1925), GYYPTSSLQPEQGQQGYYPT (SEQ ID NO: 1926), and QGQQLAQGQQGQQPAQVQQG (SEQ ID NO: 1927). Glutenin peptides were assessed after pre-treatment with transglutaminase. Hence, the requirement for deamidation for these epitopes is not known.

[0263] A comprehensive library of “uncharacterised” screening grade peptides including all unique 12mer sequences encoded by genes present in Genbank defined as (bread making) wheat (Triticum aestivum), rye, barley, or oats gluten, gliadin, glutenin, secalin, hordein, or avenin have been assessed using T cells from HLA DQ2+(and in some cases HLA DQ8+) coeliac disease volunteers six days after commencing in vivo gluten challenge. A relatively consistent pattern of epitope hierarchy has been identified in HLA DQ2 coeliac disease that is similar to but not identical after consumption of other grains toxic in coeliac disease. Peptides with the sequence PQPQLPY are dominant after wheat challenge in at least two thirds of HLA DQ2+coeliac disease, but other epitopes are occasionally dominant while PQLPY peptides are essentially inactive in fewer than one in six HLA DQ2+ subjects with coeliac disease. The contribution of rare dominant epitopes will be better assessed after screening large numbers (e.g. >30) subjects (in progress). Epitope hierarchy after rye and barley consumption is similar to that after wheat with the exception that deamidated peptides similar to the gliadin/hordein/secalin sequences PQPQQPFP or PFPQQPQQP are usually dominant rather than PQPQLPY (a sequence unique to wheat alpha-gliadins). Combitopes that comprise serial and partially overlapping gluten epitopes are as active or more active than single epitopes alone and offer a means of efficiently delivering multiple gluten epitopes for T cell recognition. Such combitopes are therefore useful in design and delivery of peptide therapies in coeliac disease that target multiple unique T cell epitopes.

### REFERENCES

[0264] 1. Molberg O, et al. Nature Med. 4, 713-717 (1998).

[0265] 2. Quarsten H, et al. Eur. J. Immunol. 29, 2506-2514 (1999).

[0266] 3. Greenberg C S et al. FASEB 5, 3071-3077 (1991).

[0267] 4. Mantzaris G, Jewell D. Scand. J. Gastroenterol. 26, 392-398 (1991).

[0268] 5. Mauri L, et al. Scand. J. Gastroenterol. 31, 247-253 (1996).

[0269] 6. Bunce M, et al. Tissue Antigens 46, 355-367 (1995).

[0270] 7. Olerup O, et al. Tissue antigens 41, 119-134 (1993).

[0271] 8. Mullighan C G, et al. Tissue-Antigens. 50, 688-92 (1997).

[0272] 9. Plebanski M et al. Eur. J. Immunol. 28, 4345-4355 (1998).

[0273] 10. Anderson D O, Greene F C. The alpha-gliadin gene family. II DNA and protein sequence variation, subfamily structure, and origins of pseudogenes. Theor Appl Genet (1997) 95:59-65.

[0274] 11. Arentz-Hansen H, Korner R, Molberg O, Quarsten H, Van der Wal Y, Kooy Y M C, Lundin K E A, Koning F, Roepstorff P, Sollid L M, McAdam S N. The intestinal T cell response to alpha-gliadin in adult celiac disease is focused on a single deamidated glutamine targeted by tissue transglutaminase. J Exp Med. 2000; 191:603-12.

[0275] 12. Vader L W, de Ru A, van der Wal, Kooy Y M C, Benckhuijsen W, Mearin M L, Drijfhout J W, van Veelen P, Koning F. Specificity of tissue transglutaminase explains cereal toxicity in celiac disease. J Exp Med 2002; 195:643-649.

[0276] 13. van der Wal Y, Kooy Y, van Veelan P, Pena S, Mearin L, Papadopoulos G, Koning F. Selective deamidation by tissue transglutaminase strongly enhances gliadin-specific T cell reactivity. J Immunol. 1998; 161:1585-8.

[0277] 14. van der Wal Y, Kooy Y, van Veelan P, Pena S, Mearin L, Molberg O, Lundin K E A, Sollid L, Mutis T, Benckhuijsen W E, Drijfhout J W, Koning F. Proc Natl Acad Sci USA 1998; 95:10050-10054.

[0278] 15. Vader W, Kooy Y, Van Veelen P et al. The gluten response in children with celiac disease is directed toward multiple gliadin and glutenin peptides. Gastroenterology 2002, 122:1729-37

[0279] 16. Arentz-Hansen H, McAdam S N, Molberg O, et al. Celiac lesion T cells recognize epitopes that cluster in regions of gliadin rich in proline residues. Gastroenterology 2002, 123:803-809.

[0280] Each of the PCT publications, U.S. patents, other patents, journal references, and any other publications cited or referred to herein is incorporated herein by reference in their entirety.

1-78. (canceled)

79. An isolated peptide comprising at least one epitope that comprises a sequence selected from the group consisting of SEQ ID NOs: 1-1927, or an analogue thereof which is capable of being recognised by a T cell receptor that recognises the peptide and which is not more than 50 amino acids in length.

80. A pharmaceutical composition comprising a peptide, or analogue thereof, according to claim 79 and a pharmaceutically acceptable carrier or diluent.

81. An isolated polynucleotide that comprises a coding sequence that encodes a peptide, or analogue thereof, according to claim 79.

82. A polynucleotide according to claim 81 that additionally comprises one or more regulatory sequences operably linked to the coding sequence.

83. A vector comprising a polynucleotide according to claim 81.

84. An isolated cell comprising a polynucleotide according to claim 81.

85. A cell according to claim 84 which is a prokaryotic cell or a mammalian cell.

86. A cell according to claim 84 which is a cell of a graminaceous monocotyledonous species.

87. A cell according to claim 86 which is a cell of wheat, maize, oats, rye, rice, barley, triticale, sorghum, or sugar cane.

88. An isolated gluten protein comprising a mutation which prevents the modification by a transglutaminase to a sequence selected from the group consisting of SEQ ID NOs: 1-1927, or a fragment of such a gluten protein which comprises at least 7 amino acids and which comprises the mutation.

89. An isolated polynucleotide that comprises a coding sequence that encodes a protein, or fragment thereof, according to claim 88.

90. A polynucleotide according to claim 89 that additionally comprises one or more regulatory sequences operably linked to the coding sequence.

91. A vector comprising a polynucleotide according to claim 89.

92. An isolated cell comprising a polynucleotide according to claim 89.

93. A cell according to claim 92 which is a prokaryotic cell or a mammalian cell.

94. A method of preventing or treating coeliac disease comprising administering to an individual at least one agent selected from:
a) a peptide comprising at least one epitope that comprises a sequence selected from the group consisting of SEQ ID NOs: 1-1927; and
b) an analogue of the peptide of a) which is capable of being recognised by a T cell receptor that recognises the peptide of a) and which is not more than 50 amino acids in length.

95. A method of claim 94 wherein the agent is HLA-DQ2-restricted.

96. A method of claim 94 wherein the agent is HLA-DQ 8-restricted.

97. A method of claim 94 wherein one agent is HLA-DQ2-restricted and a second agent is HLA-DQ8-restricted.

98. A method of claim 94 wherein the agent comprises a wheat epitope.

99. A method of claim 94 wherein the agent comprises an oat epitope.

100. A method of claim 94 wherein one agent comprises a wheat epitope and one agent comprises an oat epitope.

101. A method of preventing or treating coeliac disease comprising administering to an individual a pharmaceutical composition comprising a peptide, or analogue thereof, according to claim 79 and a pharmaceutically acceptable carrier or diluent.

102. A method of preventing or treating coeliac disease comprising:
diagnosing coeliac disease in an individual by either:
a) contacting a sample from the host with at least one agent selected from:
i) a peptide comprising at least one epitope that comprises a sequence selected from the group consisting of: SEQ ID NOS: 1-1927; and
ii) an analogue of i) which is capable of being recognised by a T cell receptor that recognises the analogue of i) and which is not more than 50 amino acids in length; and
determining in vitro whether T cells in the sample recognise the agent;
recognition by the T cells indicating that the individual has, or is susceptible to, coeliac disease; or
b) administering an agent according to claim 1 and determining in vivo whether T cells in the individual recognise the agent, recognition of the agent indicating that the individual has or is susceptible to coeliac disease; and
administering to an individual diagnosed as having, or being susceptible to, coeliac disease a therapeutic agent for preventing or treating coeliac disease.

103-120. (canceled)

121. A process for the production of a protein encoded by a coding sequence that encodes a peptide comprising at least one epitope that comprises a sequence selected from the group consisting of SEQ ID NOs: 1-1927, or analogue thereof, comprising:
a) cultivating a cell comprising a polynucleotide encoding the peptide under conditions that allow the expression of the peptide; and optionally
b) recovering the expressed peptide.

122-133. (canceled)

The application's sequence listing, which the Patent Office published only in electronic form, follows.

SEQUENCE LISTING (1928 sequences)

SEQ ID NO: 1 - protein, 9 aa, Artificial Sequence
  gluten peptide
  misc_feature (3)..(3): X is I or L or V
  misc_feature (5)..(5): X is F or Y or W
GZXPXPZPZ

SEQ ID NO: 2 - protein, 9 aa, Artificial Sequence
  gluten peptide
  misc_feature (2)..(2): X is I or L or V
  misc_feature (4)..(4): X is F or Y or W
  misc_feature (9)..(9): X is I or L or V
ZXPXPZPZX

SEQ ID NO: 3 - protein, 9 aa, Artificial Sequence
  gluten peptide
  misc_feature (4)..(4): X is F or Y or W
  misc_feature (6)..(6): X is F or Y or W
ZZPXPXZPZ

SEQ ID NO: 4 - protein, 9 aa, Artificial Sequence
  gluten peptide
  misc_feature (1)..(1): X is F or Y or W
  misc_feature (8)..(8): X is I or L or V
XPZPZZPXP

SEQ ID NO: 5 - protein, 9 aa, Artificial Sequence
  gluten peptide
  misc_feature (1)..(1): X is F or Y or W
  misc_feature (8)..(8): X is F or Y or W
XPZPZZPXP

SEQ ID NO: 6 - protein, 9 aa, Artificial Sequence
  gluten peptide
  misc_feature (4)..(4): X is I or L or V
  misc_feature (6)..(6): X isF or Y or W
ZPZXPXPZP

SEQ ID NO: 7 - protein, 9 aa, Artificial Sequence
  gluten peptide
  misc_feature (4)..(4): X is F or Y or W
  misc_feature (9)..(9): X is I or L or V
ZZPXPZPZX

SEQ ID NO: 8 - protein, 9 aa, Artificial Sequence
  gluten peptide
  misc_feature (5)..(5): X is F or Y or W
  misc_feature (6)..(6): X is S or T
PZZPXXZZG

SEQ ID NO: 9 - protein, 9 aa, Artificial Sequence
  gluten peptide
  misc_feature (2)..(2): X is F or Y or W
  misc_feature (7)..(7): X is I or L or V
  misc_feature (9)..(9): X is F or Y or W
GXPZPZXPX

SEQ ID NO: 10 - protein, 9 aa, Artificial Sequence
  gluten peptide
  misc_feature (9)..(9): X is F or Y or W
PZZZPZZPX

SEQ ID NO: 11 - protein, 9 aa, Artificial Sequence
  gluten peptide
  misc_feature (1)..(1): X is I or L or V
  misc_feature (8)..(8): X is F or Y or W
XZZPZZPXP

SEQ ID NO: 12 - protein, 9 aa, Artificial Sequence
  gluten peptide
  misc_feature (6)..(6): X is F or Y or W
  misc_feature (7)..(7): X is I or L or V
PZPZPXXPZ

SEQ ID NO: 13 - protein, 9 aa, Artificial Sequence
  gluten peptide
  misc_feature (3)..(3): X is I or L or V
  misc_feature (4)..(4): X is S or T
  misc_feature (9)..(9): X is I or L or V
ZZXXPCMDX

SEQ ID NO: 14 - protein, 9 aa, Artificial Sequence
  gluten peptide
  misc_feature (1)..(1): X is F or Y or W
  misc_feature (6)..(6): X is F or Y or W
XZZZPXPZZ

SEQ ID NO: 15 - protein, 9 aa, Artificial Sequence
  gluten peptide
  misc_feature (3)..(3): X is F or Y or W
  misc_feature (8)..(8): X is I or L or V
ZPXPZPZXP

SEQ ID NO: 16 - protein, 9 aa, Artificial Sequence
  gluten peptide
  misc_feature (8)..(8): X is F or Y or W
PZZPZZZXP

SEQ ID NO: 17 - protein, 9 aa, Artificial Sequence
  gluten peptide
  misc_feature (2)..(2): X is F or Y or W
  misc_feature (3)..(3): X is S or T
  misc_feature (9)..(9): X is I or L or V
PXXZZZZPX

SEQ ID NO: 18 - protein, 9 aa, Artificial Sequence
  gluten peptide
  misc_feature (5)..(5): X is S or T
  misc_feature (7)..(7): X is I or L or V
PZZPXPXZP

SEQ ID NO: 19 - protein, 9 aa, Artificial Sequence
  gluten peptide
  misc_feature (6)..(6): X is I or L or V
  misc_feature (8)..(8): X is I or L or V
ZPZZPXPXZ

SEQ ID NO: 20 - protein, 9 aa, Artificial Sequence
  gluten peptide
  misc_feature (7)..(7): X is I or L or V
  misc_feature (9)..(9): X is F or Y or W
ZPZZPZXPX

SEQ ID NO: 21 - protein, 9 aa, Artificial Sequence
  gluten peptide
  misc_feature (4)..(4): X is I or L or V
  misc_feature (6)..(6): X is F or Y or W
ZPZXPXPZG

SEQ ID NO: 22 - protein, 9 aa, Artificial Sequence
  gluten peptide
  misc_feature (1)..(1): X is F or Y or W
  misc_feature (6)..(6): X is I or L or V
  misc_feature (8)..(8): X is F or Y or W
XPZPZXPXG

SEQ ID NO: 23 - protein, 9 aa, Artificial Sequence
  gluten peptide
  misc_feature (5)..(5): X is F or Y or W
PZZPXCZZG

SEQ ID NO: 24 - protein, 9 aa, Artificial Sequence
  gluten peptide
  misc_feature (1)..(1): X is F or Y or W
  misc_feature (8)..(8): X is F or Y or W
XPZPZZZXP

SEQ ID NO: 25 - protein, 9 aa, Artificial Sequence
  gluten peptide
  misc_feature (4)..(4): X is S or T
  misc_feature (6)..(6): X is I or L or V
GZPXPXZPZ

SEQ ID NO: 26 - protein, 9 aa, Artificial Sequence
  gluten peptide
  misc_feature (1)..(1): X is F or Y or W
  misc_feature (2)..(2): X is I or L or V
  misc_feature (5)..(5): X is I or L or V
  misc_feature (7)..(7): X is F or Y  or W
XXPZXPXPZ

SEQ ID NO: 27 - protein, 9 aa, Artificial Sequence
  gluten peptide
  misc_feature (1)..(1): X is F or Y or W
  misc_feature (2)..(2): X is I or L or V
  misc_feature (7)..(7): X is S or T
  misc_feature (8)..(8): X is R or K or H
  misc_feature (9)..(9): X is I or L or V
XXZZZCXXX

SEQ ID NO: 28 - protein, 9 aa, Artificial Sequence
  gluten peptide
  misc_feature (2)..(2): X is F or Y or W
  misc_feature (9)..(9): X is F or Y or W
PXPZPZZPX

SEQ ID NO: 29 - protein, 9 aa, Artificial Sequence
  gluten peptide
  misc_feature (1)..(1): X is F or Y or W
  misc_feature (2)..(2): X is I or L or V
  misc_feature (8)..(8): X is F or Y or W
XXZPZZPXP

SEQ ID NO: 30 - protein, 9 aa, Artificial Sequence
  gluten peptide
  misc_feature (6)..(6): X is I or L or V
  misc_feature (8)..(8): X is R or K or H
PZZZZXAXG

SEQ ID NO: 31 - protein, 9 aa, Artificial Sequence
  gluten peptide
  misc_feature (6)..(6): X is F or Y or W
ZPZZPXPZP

SEQ ID NO: 32 - protein, 9 aa, Artificial Sequence
  gluten peptide
  misc_feature (2)..(2): X is F or Y or W
  misc_feature (4)..(4): X is I or L or V
PXPXZPZZP

SEQ ID NO: 33 - protein, 9 aa, Artificial Sequence
  gluten peptide
  misc_feature (6)..(6): X is F or Y or W
ZPZZAXPZP

SEQ ID NO: 34 - protein, 9 aa, Artificial Sequence
  gluten peptide
  misc_feature (3)..(3): X is F or Y or W
  misc_feature (5)..(5): X is S or T
  misc_feature (7)..(7): X is I or L or V
  misc_feature (9)..(9): X is F or Y or W
PZXPXZXPX

SEQ ID NO: 35 - protein, 9 aa, Artificial Sequence
  gluten peptide
  misc_feature (2)..(2): X is F or Y or W
  misc_feature (9)..(9): X is I or L or V
PXPZPZZZX

SEQ ID NO: 36 - protein, 9 aa, Artificial Sequence
  gluten peptide
  misc_feature (4)..(4): X is I or L or V
  misc_feature (6)..(6): X is F or Y or W
PPZXPXPZP

SEQ ID NO: 37 - protein, 9 aa, Artificial Sequence
  gluten peptide
  misc_feature (3)..(3): X is I or L or V
  misc_feature (6)..(6): X is F or Y or W
MZXZPXPZP

SEQ ID NO: 38 - protein, 9 aa, Artificial Sequence
  gluten peptide
  misc_feature (3)..(4): X is S or T
  misc_feature (6)..(6): X is R or K or H
  misc_feature (7)..(7): X is I or L or V
ZZXXCXXMZ

SEQ ID NO: 39 - protein, 9 aa, Artificial Sequence
  gluten peptide
  misc_feature (3)..(3): X is F or Y or W
  misc_feature (4)..(4): X is S or T
ZZXXZPZZZ

SEQ ID NO: 40 - protein, 9 aa, Artificial Sequence
  gluten peptide
  misc_feature (5)..(5): X is F or Y or W
PZZZXPZPZ

SEQ ID NO: 41 - protein, 9 aa, Artificial Sequence
  gluten peptide
  misc_feature (2)..(2): X is I or L or V
  misc_feature (5)..(5): X is I or L or V
  misc_feature (8)..(8): X is R or K or H
PXPZXZPXN

SEQ ID NO: 42 - protein, 9 aa, Artificial Sequence
  gluten peptide
  misc_feature (1)..(2): X is S or T
  misc_feature (4)..(4): X is I or L or V
  misc_feature (5)..(5): X is S or T
  misc_feature (7)..(7): X is I or L or V
  misc_feature (9)..(9): X is R or K or H
XXCXXGXZX

SEQ ID NO: 43 - protein, 9 aa, Artificial Sequence
  gluten peptide
  misc_feature (1)..(1): X is F or Y or W
  misc_feature (6)..(6): X is I or L or V
XZZZPXPPZ

SEQ ID NO: 44 - protein, 9 aa, Artificial Sequence
  gluten peptide
  misc_feature (3)..(3): X is I or L or V
  misc_feature (8)..(8): X is S or T
  misc_feature (9)..(9): X is F or Y or W
ZPXPZZPXX

SEQ ID NO: 45 - protein, 9 aa, Artificial Sequence
  gluten peptide
  misc_feature (1)..(2): X is I or L or V
  misc_feature (3)..(3): X is F or Y or W
  misc_feature (4)..(5): X is S or T
  misc_feature (6)..(7): X is I or L or V
XXXXXXXZZ

SEQ ID NO: 46 - protein, 9 aa, Artificial Sequence
  gluten peptide
  misc_feature (3)..(4): X is I or L or V
  misc_feature (5)..(5): X is S or T
ZPXXXZZPP

SEQ ID NO: 47 - protein, 9 aa, Artificial Sequence
  gluten peptide
  misc_feature (3)..(3): X is I or L or V
  misc_feature (5)..(6): X is I or L or V
  misc_feature (7)..(7): X is R or K or H
  misc_feature (9)..(9): X is I or L or V
ZGXZXXXPX

SEQ ID NO: 48 - protein, 9 aa, Artificial Sequence
  gluten peptide
  misc_feature (2)..(2): X is F or Y or W
  misc_feature (3)..(4): X is S or T
  misc_feature (5)..(6): X is I or L or V
  misc_feature (9)..(9): X is I or L or V
PXXXXXAGX

SEQ ID NO: 49 - protein, 9 aa, Artificial Sequence
  gluten peptide
  misc_feature (1)..(1): X is F or Y or W
  misc_feature (3)..(5): X is S or T
  misc_feature (6)..(6): X is I or L or V
  misc_feature (9)..(9): X is I or L or V
XCXXXXAPX

SEQ ID NO: 50 - protein, 9 aa, Artificial Sequence
  gluten peptide
  misc_feature (1)..(1): X is R or K or H
  misc_feature (2)..(2): X is I or L or V
  misc_feature (5)..(5): X is S or T
  misc_feature (7)..(7): X is R or K or H
  misc_feature (8)..(8): X is I or L or V
XXAMXZXXA

SEQ ID NO: 51 - protein, 9 aa, Artificial Sequence
  gluten peptide
  misc_feature (4)..(4): X is S or T
  misc_feature (5)..(5): X is F or Y or W
ZPZXXPPZZ

SEQ ID NO: 52 - protein, 9 aa, Artificial Sequence
  gluten peptide
SIILQZQQQ

SEQ ID NO: 53 - protein, 9 aa, Artificial Sequence
  gluten peptide
  misc_feature (2)..(2): X is S or T
  misc_feature (9)..(9): X is F or Y or W
ZXZZPZZPX

SEQ ID NO: 54 - protein, 9 aa, Artificial Sequence
  gluten peptide
  misc_feature (2)..(2): X is I or L or V
  misc_feature (9)..(9): X is I or L or V
ZXZZPZZPX

SEQ ID NO: 55 - protein, 9 aa, Artificial Sequence
  gluten peptide
  misc_feature (1)..(1): X is I or L or V
  misc_feature (9)..(9): X is F or Y or W
XPZZPZZPX

SEQ ID NO: 56 - protein, 9 aa, Artificial Sequence
  gluten peptide
  misc_feature (1)..(1): X is F or Y or W
  misc_feature (9)..(9): X is F or Y or W
XPZZPZZPX

SEQ ID NO: 57 - protein, 9 aa, Artificial Sequence
  gluten peptide
  misc_feature (1)..(1): X is S or T
  misc_feature (3)..(3): X is I or L or V
  misc_feature (9)..(9): X is F or Y or W
XPXZPZZPX

SEQ ID NO: 58 - protein, 9 aa, Artificial Sequence
  gluten peptide
  misc_feature (2)..(2): X is F or Y or W
  misc_feature (3)..(3): X is S or T
  misc_feature (9)..(9): X is I or L or V
PXXZZPZZX

SEQ ID NO: 59 - protein, 9 aa, Artificial Sequence
  gluten peptide
  misc_feature (4)..(4): X is I or L or V
  misc_feature (5)..(5): X is F or Y or W
GZZXXPZPZ

SEQ ID NO: 60 - protein, 9 aa, Artificial Sequence
  gluten peptide
  misc_feature (9)..(9): X is F or Y or W
ZPZZPZZPX

SEQ ID NO: 61 - protein, 9 aa, Artificial Sequence
  gluten peptide
  misc_feature (1)..(1): X is F or Y or W
  misc_feature (9)..(9): X is I or L or V
XPZZPZZPX

SEQ ID NO: 62 - protein, 9 aa, Artificial Sequence
  gluten peptide
  misc_feature (2)..(3): X is S or T
  misc_feature (8)..(8): X is F or Y or W
PXXZZPPXP

SEQ ID NO: 63 - protein, 9 aa, Artificial Sequence
  gluten peptide
  misc_feature (1)..(1): X is F or Y or W
  misc_feature (7)..(7): X is I or L or V
  misc_feature (9)..(9): X is F or Y or W
XPZZPZXPX

SEQ ID NO: 64 - protein, 9 aa, Artificial Sequence
  gluten peptide
  misc_feature (2)..(2): X is F or Y or W
  misc_feature (4)..(4): X is F or Y or W
PXPXZPZZP

SEQ ID NO: 65 - protein, 9 aa, Artificial Sequence
  gluten peptide
  misc_feature (4)..(4): X is S or T
  misc_feature (5)..(5): X is F or Y or W
  misc_feature (7)..(7): X is R or K or H
PZZXXPXZG

SEQ ID NO: 66 - protein, 9 aa, Artificial Sequence
  gluten peptide
  misc_feature (1)..(1): X is S or T
  misc_feature (2)..(2): X is F or Y or W
  misc_feature (4)..(4): X is R or K or H
XXPXZPZZA

SEQ ID NO: 67 - protein, 9 aa, Artificial Sequence
  gluten peptide
  misc_feature (1)..(1): X is F or Y or W
  misc_feature (2)..(2): X is S or T
  misc_feature (7)..(7): X is S or T
  misc_feature (8)..(8): X is F or Y or W
  misc_feature (9)..(9): X is S or T
XXZZZPXXX

SEQ ID NO: 68 - protein, 9 aa, Artificial Sequence
  gluten peptide
  misc_feature (2)..(2): X is F or Y or W
  misc_feature (8)..(8): X is S or T
  misc_feature (9)..(9): X is F or Y or W
AXPZPZZXX

SEQ ID NO: 69 - protein, 9 aa, Artificial Sequence
  gluten peptide
  misc_feature (1)..(1): X is S or T
  misc_feature (5)..(5): X is F or Y or W
  misc_feature (6)..(6): X is S or T
XZZPXXZPZ

SEQ ID NO: 70 - protein, 9 aa, Artificial Sequence
  gluten peptide
  misc_feature (1)..(1): X is I or L or V
  misc_feature (4)..(4): X is F or Y or W
XZPXPZPZP

SEQ ID NO: 71 - protein, 9 aa, Artificial Sequence
  gluten peptide
  misc_feature (2)..(2): X is F or Y or W
  misc_feature (4)..(4): X is R or K or H
  misc_feature (7)..(7): X is I or L or V
  misc_feature (9)..(9): X is F or Y or W
PXPXPZXPX

SEQ ID NO: 72 - protein, 9 aa, Artificial Sequence
  gluten peptide
  misc_feature (3)..(3): X is I or L or V
  misc_feature (4)..(4): X is F or Y or W
ZZXXPZPZZ

SEQ ID NO: 73 - protein, 9 aa, Artificial Sequence
  gluten peptide
  misc_feature (5)..(5): X is S or T
  misc_feature (6)..(6): X is F or Y or W
  misc_feature (9)..(9): X is R or K or H
ZPZZXXPZX

SEQ ID NO: 74 - protein, 9 aa, Artificial Sequence
  gluten peptide
  misc_feature (1)..(1): X is F or Y or W
  misc_feature (4)..(4): X is R or K or H
  misc_feature (9)..(9): X is F or Y or W
XPZXPZZPX

SEQ ID NO: 75 - protein, 9 aa, Artificial Sequence
  gluten peptide
  misc_feature (1)..(1): X is I or L or V
  misc_feature (4)..(4): X is F or Y or W
  misc_feature (9)..(9): X is I or L or V
XZPXPZPZX

SEQ ID NO: 76 - protein, 9 aa, Artificial Sequence
  gluten peptide
  misc_feature (3)..(3): X is F or Y or W
  misc_feature (6)..(6): X is S or T
  misc_feature (9)..(9): X is S or T
ZPXPZXZZX

SEQ ID NO: 77 - protein, 9 aa, Artificial Sequence
  gluten peptide
  misc_feature (2)..(3): X is S or T
  misc_feature (5)..(5): X is I or L or V
  misc_feature (8)..(8): X is I or L or V
ZXXCXPGXZ

SEQ ID NO: 78 - protein, 9 aa, Artificial Sequence
  gluten peptide
  misc_feature (2)..(3): X is I or L or V
  misc_feature (5)..(5): X is R or K or H
  misc_feature (9)..(9): X is F or Y or W
PXXPXGPPX

SEQ ID NO: 79 - protein, 9 aa, Artificial Sequence
  gluten peptide
  misc_feature (6)..(6): X is F or Y or W
ZPZZZXPZP

SEQ ID NO: 80 - protein, 9 aa, Artificial Sequence
  gluten peptide
  misc_feature (7)..(7): X is S or T
NMZADPXGZ

SEQ ID NO: 81 - protein, 9 aa, Artificial Sequence
  gluten peptide
  misc_feature (3)..(3): X is I or L or V
  misc_feature (5)..(6): X is S or T
  misc_feature (7)..(7): X is I or L or V
  misc_feature (8)..(8): X is S or T
GAXCXXXXN

SEQ ID NO: 82 - protein, 9 aa, Artificial Sequence
  gluten peptide
  misc_feature (2)..(2): X is F or Y or W
  misc_feature (7)..(7): X is I or L or V
  misc_feature (9)..(9): X is I or L or V
ZXPZZZXPX

SEQ ID NO: 83 - protein, 9 aa, Artificial Sequence
  gluten peptide
  misc_feature (5)..(7): X is I or L or V
ZZZPXXXZZ

SEQ ID NO: 84 - protein, 9 aa, Artificial Sequence
  gluten peptide
  misc_feature (1)..(1): X is S or T
  misc_feature (7)..(7): X is S or T
  misc_feature (8)..(8): X is F or Y or W
XZZPZZXXP

SEQ ID NO: 85 - protein, 9 aa, Artificial Sequence
  gluten peptide
  misc_feature (1)..(1): X is F or Y or W
  misc_feature (2)..(3): X is R or K or H
  misc_feature (8)..(8): X is S or T
  misc_feature (9)..(9): X is F or Y or W
XXXZPZZXX

SEQ ID NO: 86 - protein, 9 aa, Artificial Sequence
  gluten peptide
  misc_feature (1)..(1): X is R or K or H
  misc_feature (2)..(4): X is F or Y or W
  misc_feature (6)..(7): X is S or T
  misc_feature (9)..(9): X is R or K or H
XXXXPXXPX

SEQ ID NO: 87 - protein, 9 aa, Artificial Sequence
  gluten peptide
  misc_feature (1)..(1): X is R or K or H
  misc_feature (7)..(7): X is F or Y or W
  misc_feature (8)..(8): X is S or T
XZPZZZXXZ

SEQ ID NO: 88 - protein, 9 aa, Artificial Sequence
  gluten peptide
  misc_feature (1)..(1): X is S or T
  misc_feature (2)..(2): X is I or L or V
  misc_feature (5)..(6): X is I or L or V
XXZZXXZZZ

SEQ ID NO: 89 - protein, 9 aa, Artificial Sequence
  gluten peptide
  misc_feature (1)..(1): X is I or L or V
  misc_feature (5)..(5): X is I or L or V
XZZPXPPZZ

SEQ ID NO: 90 - protein, 9 aa, Artificial Sequence
  gluten peptide
  misc_feature (2)..(2): X is I or L or V
  misc_feature (3)..(3): X is S or T
  misc_feature (7)..(7): X is S or T
PXXPZZXGZ

SEQ ID NO: 91 - protein, 9 aa, Artificial Sequence
  gluten peptide
  misc_feature (4)..(4): X is F or Y or W
PZPXPZPZP

SEQ ID NO: 92 - protein, 9 aa, Artificial Sequence
  gluten peptide
  misc_feature (5)..(5): X is F or Y or W
ZPZPXPZPZ

SEQ ID NO: 93 - protein, 9 aa, Artificial Sequence
  gluten peptide
  misc_feature (1)..(1): X is F or Y or W
  misc_feature (8)..(8): X is S or T
  misc_feature (9)..(9): X is F or Y or W
XPZZPZZXX

SEQ ID NO: 94 - protein, 9 aa, Artificial Sequence
  gluten peptide
  misc_feature (3)..(3): X is S or T
  misc_feature (4)..(4): X is F or Y or W
  misc_feature (5)..(5): X is S or T
ZZXXXZZPP

SEQ ID NO: 95 - protein, 9 aa, Artificial Sequence
  gluten peptide
  misc_feature (1)..(1): X is F or Y or W
  misc_feature (6)..(6): X is F or Y or W
XPZZPXPZZ

SEQ ID NO: 96 - protein, 9 aa, Artificial Sequence
  gluten peptide
  misc_feature (3)..(4): X is S or T
  misc_feature (8)..(8): X is I or L or V
  misc_feature (9)..(9): X is S or T
ZPXXZZPXX

SEQ ID NO: 97 - protein, 9 aa, Artificial Sequence
  gluten peptide
  misc_feature (3)..(3): X is I or L or V
  misc_feature (6)..(6): X is R or K or H
  misc_feature (8)..(8): X is S or T
  misc_feature (9)..(9): X is F or Y or W
ZPXZZXZXX

SEQ ID NO: 98 - protein, 9 aa, Artificial Sequence
  gluten peptide
  misc_feature (1)..(1): X is I or L or V
  misc_feature (2)..(2): X is S or T
  misc_feature (6)..(6): X is I or L or V
XXPZZXGZG

SEQ ID NO: 99 - protein, 9 aa, Artificial Sequence
  gluten peptide
  misc_feature (7)..(7): X is R or K or H
  misc_feature (8)..(8): X is I or L or V
ZZZCCZXXP

SEQ ID NO: 100 - protein, 9 aa, Artificial Sequence
  gluten peptide
  misc_feature (8)..(9): X is F or Y or W
AGZGZZGXX

SEQ ID NO: 101 - protein, 9 aa, Artificial Sequence
  gluten peptide
  misc_feature (5)..(5): X is F or Y or W
ZZZPXPZPZ

SEQ ID NO: 102 - protein, 9 aa, Artificial Sequence
  gluten peptide
  misc_feature (2)..(2): X is I or L or V
  misc_feature (4)..(4): X is F or Y or W
ZXZXPZZZZ

SEQ ID NO: 103 - protein, 9 aa, Artificial Sequence
  gluten peptide
  misc_feature (3)..(3): X is I or L or V
  misc_feature (6)..(6): X is I or L or V
ZPXZZXCCZ

SEQ ID NO: 104 - protein, 9 aa, Artificial Sequence
  gluten peptide
  misc_feature (2)..(2): X is F or Y or W
  misc_feature (7)..(7): X is F or Y or W
  misc_feature (9)..(9): X is S or T
PXPZPZXPX

SEQ ID NO: 105 - protein, 9 aa, Artificial Sequence
  gluten peptide
  misc_feature (2)..(2): X is I or L or V
  misc_feature (4)..(4): X is S or T
  misc_feature (5)..(5): X is I or L or V
  misc_feature (7)..(7): X is S or T
AXZXXPXMC

SEQ ID NO: 106 - protein, 9 aa, Artificial Sequence
  gluten peptide
  misc_feature (1)..(1): X is R or K or H
  misc_feature (2)..(2): X is I or L or V
  misc_feature (3)..(3): X is F or Y or W
  misc_feature (5)..(5): X is I or L or V
  misc_feature (8)..(8): X is R or K or H
  misc_feature (9)..(9): X is I or L or V
XXXZXPZXX

SEQ ID NO: 107 - protein, 9 aa, Artificial Sequence
  gluten peptide
  misc_feature (2)..(2): X is F or Y or W
  misc_feature (5)..(5): X is S or T
  misc_feature (8)..(8): X is S or T
  misc_feature (9)..(9): X is F or Y or W
PXPZXZZXX

SEQ ID NO: 108 - protein, 9 aa, Artificial Sequence
  gluten peptide
  misc_feature (3)..(4): X is F or Y or W
  misc_feature (7)..(7): X is S or T
ZGXXZPXZZ

SEQ ID NO: 109 - protein, 9 aa, Artificial Sequence
  gluten peptide
  misc_feature (2)..(2): X is S or T
  misc_feature (3)..(3): X is I or L or V
  misc_feature (4)..(4): X is F or Y or W
  misc_feature (6)..(7): X is S or T
  misc_feature (9)..(9): X is R or K or H
ZXXXZXXCX

SEQ ID NO: 110 - protein, 9 aa, Artificial Sequence
  gluten peptide
  misc_feature (1)..(1): X is I or L or V
  misc_feature (2)..(3): X is S or T
  misc_feature (4)..(4): X is I or L or V
  misc_feature (5)..(5): X is F or Y or W
  misc_feature (6)..(6): X is S or T
  misc_feature (7)..(9): X is I or L or V
XXXXXXXXX

SEQ ID NO: 111 - protein, 9 aa, Artificial Sequence
  gluten peptide
  misc_feature (2)..(2): X is S or T
  misc_feature (3)..(3): X is F or Y or W
  misc_feature (9)..(9): X is S or T
ZXXPZPZZX

SEQ ID NO: 112 - protein, 9 aa, Artificial Sequence
  gluten peptide
  misc_feature (4)..(4): X is S or T
  misc_feature (5)..(5): X is R or K or H
  misc_feature (6)..(6): X is I or L or V
  misc_feature (9)..(9): X is I or L or V
MZNXXXPGX

SEQ ID NO: 113 - protein, 9 aa, Artificial Sequence
  gluten peptide
  misc_feature (4)..(4): X is S or T
  misc_feature (6)..(6): X is I or L or V
  misc_feature (8)..(8): X is I or L or V
ZZCXPXAXP

SEQ ID NO: 114 - protein, 9 aa, Artificial Sequence
  gluten peptide
  misc_feature (2)..(2): X is F or Y or W
  misc_feature (3)..(3): X is S or T
  misc_feature (8)..(8): X is I or L or V
PXXZZZZXP

SEQ ID NO: 115 - protein, 9 aa, Artificial Sequence
  gluten peptide
  misc_feature (2)..(2): X is S or T
  misc_feature (3)..(3): X is R or K or H
  misc_feature (5)..(5): X is I or L or V
  misc_feature (8)..(8): X is I or L or V
ZXXCXPGXZ

SEQ ID NO: 116 - protein, 9 aa, Artificial Sequence
  gluten peptide
  misc_feature (1)..(1): X is I or L or V
  misc_feature (3)..(3): X is S or T
  misc_feature (4)..(4): X is I or L or V
  misc_feature (6)..(6): X is R or K or H
  misc_feature (8)..(8): X is I or L or V
XPXXZXPXZ

SEQ ID NO: 117 - protein, 9 aa, Artificial Sequence
  gluten peptide
  misc_feature (3)..(3): X is I or L or V
  misc_feature (5)..(5): X is F or Y or W
AZXPXPZZP

SEQ ID NO: 118 - protein, 9 aa, Artificial Sequence
  gluten peptide
  misc_feature (1)..(1): X is S or T
  misc_feature (2)..(4): X is I or L or V
  misc_feature (5)..(5): X is R or K or H
  misc_feature (6)..(6): X is S or T
  misc_feature (7)..(7): X is I or L or V
XXXXXXXPN

SEQ ID NO: 119 - protein, 9 aa, Artificial Sequence
  gluten peptide
  misc_feature (3)..(3): X is I or L or V
  misc_feature (6)..(6): X is I or L or V
  misc_feature (7)..(7): X is R or K or H
  misc_feature (8)..(8): X is S or T
  misc_feature (9)..(9): X is I or L or V
AZXZGXXXX

SEQ ID NO: 120 - protein, 9 aa, Artificial Sequence
  gluten peptide
  misc_feature (6)..(6): X is I or L or V
  misc_feature (9)..(9): X is I or L or V
ZZPAZXZGX

SEQ ID NO: 121 - protein, 9 aa, Artificial Sequence
  gluten peptide
  misc_feature (1)..(1): X is S or T
  misc_feature (3)..(3): X is I or L or V
  misc_feature (8)..(8): X is R or K or H
  misc_feature (9)..(9): X is I or L or V
XPXAMPZXX

SEQ ID NO: 122 - protein, 9 aa, Artificial Sequence
  gluten peptide
  misc_feature (2)..(2): X is I or L or V
  misc_feature (6)..(6): X is R or K or H
  misc_feature (8)..(8): X is F or Y or W
  misc_feature (9)..(9): X is I or L or V
ZXNPCXNXX

SEQ ID NO: 123 - protein, 9 aa, Artificial Sequence
  gluten peptide
  misc_feature (1)..(1): X is I or L or V
  misc_feature (6)..(6): X is I or L or V
  misc_feature (9)..(9): X is I or L or V
XZPZZXAZX

SEQ ID NO: 124 - protein, 9 aa, Artificial Sequence
  gluten peptide
  misc_feature (2)..(2): X is F or Y or W
  misc_feature (3)..(3): X is S or T
  misc_feature (8)..(8): X is I or L or V
ZXXZZZZXP

SEQ ID NO: 125 - protein, 9 aa, Artificial Sequence
  gluten peptide
  misc_feature (1)..(1): X is F or Y or W
  misc_feature (7)..(7): X is F or Y or W
XPZPZPXPP

SEQ ID NO: 126 - protein, 9 aa, Artificial Sequence
  gluten peptide
  misc_feature (1)..(1): X is F or Y or W
  misc_feature (8)..(8): X is F or Y or W
XPZPZZPXC

SEQ ID NO: 127 - protein, 9 aa, Artificial Sequence
  gluten peptide
  misc_feature (3)..(3): X is I or L or V
  misc_feature (6)..(6): X is I or L or V
ZZXPZXPZZ

SEQ ID NO: 128 - protein, 9 aa, Artificial Sequence
  gluten peptide
  misc_feature (4)..(4): X is S or T
  misc_feature (7)..(8): X is I or L or V
PZZXZZXXP

SEQ ID NO: 129 - protein, 9 aa, Artificial Sequence
  gluten peptide
  misc_feature (5)..(5): X is S or T
  misc_feature (7)..(7): X is S or T
  misc_feature (9)..(9): X is R or K or H
PNNNXPXNX

SEQ ID NO: 130 - protein, 9 aa, Artificial Sequence
  gluten peptide
  misc_feature (9)..(9): X is R or K or H
MZZZZZZZX

SEQ ID NO: 131 - protein, 9 aa, Artificial Sequence
  gluten peptide
  misc_feature (7)..(7): X is R or K or H
  misc_feature (9)..(9): X is F or Y or W
ZZMNPCXNX

SEQ ID NO: 132 - protein, 9 aa, Artificial Sequence
  gluten peptide
  misc_feature (3)..(3): X is I or L or V
  misc_feature (5)..(5): X is I or L or V
  misc_feature (7)..(7): X is I or L or V
  misc_feature (8)..(8): X is F or Y or W
  misc_feature (9)..(9): X is R or K or H
CNXNXPXXX

SEQ ID NO: 133 - protein, 9 aa, Artificial Sequence
  gluten peptide
  misc_feature (1)..(2): X is I or L  or V
  misc_feature (3)..(3): X is S or T
  misc_feature (4)..(6): X is I or L or V
  misc_feature (8)..(8): X is R or K or H
  misc_feature (9)..(9): X is S or T
XXXXXXPXX

SEQ ID NO: 134 - protein, 9 aa, Artificial Sequence
  gluten peptide
  misc_feature (2)..(2): X is I or L or V
  misc_feature (5)..(5): X is I or L or V
  misc_feature (9)..(9): X is S or T
ZXAZXPZZX

SEQ ID NO: 135 - protein, 9 aa, Artificial Sequence
  gluten peptide
  misc_feature (1)..(1): X is R or K or H
  misc_feature (3)..(3): X is F or Y or W
  misc_feature (4)..(4): X is I or L or V
  misc_feature (8)..(8): X is I or L or V
XPXXZZPXP

SEQ ID NO: 136 - protein, 9 aa, Artificial Sequence
  gluten peptide
  misc_feature (2)..(2): X is F or Y or W
PXPZPZZPZ

SEQ ID NO: 137 - protein, 9 aa, Artificial Sequence
  gluten peptide
  misc_feature (1)..(1): X is F or Y or W
XPZPZZPZZ

SEQ ID NO: 138 - protein, 9 aa, Artificial Sequence
  gluten peptide
  misc_feature (3)..(3): X is I or L or V
  misc_feature (6)..(6): X is I or L or V
ZZXZZXCCZ

SEQ ID NO: 139 - protein, 9 aa, Artificial Sequence
  gluten peptide
  misc_feature (4)..(4): X is S or T
  misc_feature (5)..(5): X is F or Y or W
  misc_feature (9)..(9): X is S or T
PZZXXPZZX

SEQ ID NO: 140 - protein, 9 aa, Artificial Sequence
  gluten peptide
  misc_feature (1)..(1): X is I or L or V
  misc_feature (2)..(2): X is F or Y or W
  misc_feature (9)..(9): X is F or Y or W
XXPZPZPZX

SEQ ID NO: 141 - protein, 9 aa, Artificial Sequence
  gluten peptide
  misc_feature (4)..(4): X is F or Y or W
ZZPXPZZPZ

SEQ ID NO: 142 - protein, 9 aa, Artificial Sequence
  gluten peptide
  misc_feature (2)..(2): X is I or L or V
  misc_feature (5)..(5): X is I or L or V
  misc_feature (7)..(7): X is I or L or V
  misc_feature (9)..(9): X is S or T
ZXAZXZXMX

SEQ ID NO: 143 - protein, 9 aa, Artificial Sequence
  gluten peptide
  misc_feature (1)..(1): X is F or Y or W
  misc_feature (3)..(3): X is I or L or V
  misc_feature (7)..(7): X is S or T
XZXPZZXZC

SEQ ID NO: 144 - protein, 9 aa, Artificial Sequence
  gluten peptide
  misc_feature (4)..(4): X is S or T
  misc_feature (8)..(8): X is I or L or V
ZZZXZZZXG

SEQ ID NO: 145 - protein, 9 aa, Artificial Sequence
  gluten peptide
  misc_feature (1)..(1): X is S or T
  misc_feature (2)..(3): X is I or L or V
  misc_feature (6)..(6): X is S or T
  misc_feature (7)..(8): X is I or L or V
XXXZPXXXZ

SEQ ID NO: 146 - protein, 9 aa, Artificial Sequence
  gluten peptide
  misc_feature (1)..(1): X is F or Y or W
  misc_feature (2)..(2): X is S or T
  misc_feature (4)..(6): X is S or T
  misc_feature (7)..(7): X is I or L or V
  misc_feature (8)..(8): X is R or K or H
  misc_feature (9)..(9): X is F or Y or W
XXAXXXXXX

SEQ ID NO: 147 - protein, 9 aa, Artificial Sequence
  gluten peptide
  misc_feature (1)..(1): X is R or K or H
  misc_feature (9)..(9): X is I or L or V
XZZZZZZZX

SEQ ID NO: 148 - protein, 9 aa, Artificial Sequence
  gluten peptide
  misc_feature (1)..(2): X is I or L or V
  misc_feature (6)..(6): X is I or L or V
  misc_feature (7)..(7): X is S or T
XXZZZXXPC

SEQ ID NO: 149 - protein, 9 aa, Artificial Sequence
  gluten peptide
  misc_feature (3)..(4): X is I or L or V
  misc_feature (9)..(9): X is I or L or V
ZZXXPZZZX

SEQ ID NO: 150 - protein, 9 aa, Artificial Sequence
  gluten peptide
  misc_feature (1)..(1): X is F or Y or W
  misc_feature (2)..(2): X is S or T
  misc_feature (8)..(8): X is F or Y or W
XXZZZZPXP

SEQ ID NO: 151 - protein, 9 aa, Artificial Sequence
  gluten peptide
  misc_feature (2)..(2): X is I or L or V
  misc_feature (5)..(5): X is I or L or V
  misc_feature (7)..(7): X is R or K or H
  misc_feature (9)..(9): X is F or Y or W
CXPGXZXPX

SEQ ID NO: 152 - protein, 9 aa, Artificial Sequence
  gluten peptide
  misc_feature (5)..(5): X is I or L or V
  misc_feature (7)..(7): X is I or L or V
ZZZCXPXAM

SEQ ID NO: 153 - protein, 9 aa, Artificial Sequence
  gluten peptide
  misc_feature (2)..(2): X is I or L or V
  misc_feature (5)..(5): X is I or L or V
  misc_feature (7)..(7): X is R or K or H
  misc_feature (9)..(9): X is I or L or V
ZXAZXPRZX

SEQ ID NO: 154 - protein, 9 aa, Artificial Sequence
  gluten peptide
  misc_feature (4)..(4): X is R or K or H
  misc_feature (6)..(6): X is F or Y or W
ZZPXZXPZZ

SEQ ID NO: 155 - protein, 9 aa, Artificial Sequence
  gluten peptide
  misc_feature (1)..(1): X is R or K or H
  misc_feature (5)..(5): X is I or L or V
  misc_feature (4)..(4): X is F or Y or W
XPMXXZPZZ

SEQ ID NO: 156 - protein, 9 aa, Artificial Sequence
  gluten peptide
  misc_feature (1)..(1): X is I or L or V
  misc_feature (9)..(9): X is R or K or H
XZZZMNPCX

SEQ ID NO: 157 - protein, 9 aa, Artificial Sequence
  gluten peptide
  misc_feature (1)..(1): X is S or T
  misc_feature (2)..(2): X is R or K or H
  misc_feature (3)..(4): X is I or L or V
  misc_feature (5)..(5): X is S or T
  misc_feature (7)..(7): X is R or K or H
  misc_feature (9)..(9): X is R or K or H
XXXXXPXGX

SEQ ID NO: 158 - protein, 9 aa, Artificial Sequence
  gluten peptide
  misc_feature (1)..(1): X is R or K or H
XZZZZZZZP

SEQ ID NO: 159 - protein, 9 aa, Artificial Sequence
  gluten peptide
  misc_feature (4)..(4): X is I or L or V
DCZXMZZZC

SEQ ID NO: 160 - protein, 9 aa, Artificial Sequence
  gluten peptide
  misc_feature (1)..(1): X is S or T
  misc_feature (5)..(5): X is I or L or V
  misc_feature (7)..(7): X is F or Y or W
  misc_feature (8)..(8): X is S or T
XZPZXPXXZ

SEQ ID NO: 161 - protein, 9 aa, Artificial Sequence
  gluten peptide
  misc_feature (2)..(2): X is I or L or V
  misc_feature (4)..(4): X is F or Y or W
  misc_feature (5)..(5): X is S or T
ZXPXXZZZZ

SEQ ID NO: 162 - protein, 9 aa, Artificial Sequence
  gluten peptide
  misc_feature (4)..(4): X is F or Y or W
  misc_feature (6)..(6): X is I or L or V
ZZPXPXZPZ

SEQ ID NO: 163 - protein, 9 aa, Artificial Sequence
  gluten peptide
  misc_feature (1)..(1): X is R or K or H
  misc_feature (2)..(2): X is F or Y or W
  misc_feature (5)..(5): X is I or L or V
  misc_feature (6)..(6): X is R or K or H
  misc_feature (8)..(9): X is I or L or V
XXDAXXAXX

SEQ ID NO: 164 - protein, 9 aa, Artificial Sequence
  gluten peptide
  misc_feature (2)..(2): X is S or T
  misc_feature (3)..(3): X is R or K or H
  misc_feature (4)..(4): X is F or Y or W
  misc_feature (7)..(7): X is I or L or V
  misc_feature (8)..(8): X is R or K or H
ZXXXDAXXA

SEQ ID NO: 165 - protein, 9 aa, Artificial Sequence
  gluten peptide
  misc_feature (3)..(3): X is S or T
  misc_feature (9)..(9): X is I or L or V
ZPXPZPZZX

SEQ ID NO: 166 - protein, 9 aa, Artificial Sequence
  gluten peptide
  misc_feature (1)..(1): X is S or T
  misc_feature (2)..(2): X is I or L or V
  misc_feature (3)..(3): X is R or K or H
  misc_feature (7)..(8): X is I or L or V
XXXZZPXXP

SEQ ID NO: 167 - protein, 9 aa, Artificial Sequence
  gluten peptide
  misc_feature (3)..(3): X is F or Y or W
  misc_feature (4)..(4): X is S or T
  misc_feature (5)..(5): X is I or L or V
  misc_feature (6)..(6): X is R or K or H
PPXXXXZZP

SEQ ID NO: 168 - protein, 9 aa, Artificial Sequence
  gluten peptide
  misc_feature (1)..(1): X is F or Y or W
  misc_feature (3)..(5): X is I or L or V
XPXXXZZZZ

SEQ ID NO: 169 - protein, 9 aa, Artificial Sequence
  gluten peptide
  misc_feature (1)..(1): X is F or Y or W
  misc_feature (2)..(2): X is S or T
  misc_feature (9)..(9): X is F or Y or W
XXZZZZPPX

SEQ ID NO: 170 - protein, 9 aa, Artificial Sequence
  gluten peptide
  misc_feature (2)..(2): X is R or K or H
  misc_feature (6)..(7): X is I or L or V
ZXZZPXXPZ

SEQ ID NO: 171 - protein, 9 aa, Artificial Sequence
  gluten peptide
  misc_feature (5)..(5): X is F or Y or W
  misc_feature (6)..(6): X is S or T
  misc_feature (9)..(9): X is S or T
ZZPPXXZZX

SEQ ID NO: 172 - protein, 9 aa, Artificial Sequence
  gluten peptide
ZZZZZZZZP

SEQ ID NO: 173 - protein, 9 aa, Artificial Sequence
  gluten peptide
  misc_feature (8)..(8): X is F or Y or W
  misc_feature (9)..(9): X is S or T
ZZZZZPPXX

SEQ ID NO: 174 - protein, 9 aa, Artificial Sequence
  gluten peptide
  misc_feature (2)..(2): X is S or T
  misc_feature (3)..(3): X is I or L or V
  misc_feature (6)..(6): X is S or T
  misc_feature (7)..(8): X is I or L or V
PXXZPXXXZ

SEQ ID NO: 175 - protein, 9 aa, Artificial Sequence
  gluten peptide
  misc_feature (5)..(5): X is I or L or V
PZZZXGZZP

SEQ ID NO: 176 - protein, 9 aa, Artificial Sequence
  gluten peptide
  misc_feature (2)..(2): X is S or T
  misc_feature (3)..(3): X is F or Y or W
CXXZZPZZZ

SEQ ID NO: 177 - protein, 9 aa, Artificial Sequence
  gluten peptide
  misc_feature (1)..(1): X is R or K or H
  misc_feature (3)..(3): X is I or L or V
  misc_feature (7)..(7): X is R or K or H
  misc_feature (8)..(8): X is I or L or V
  misc_feature (9)..(9): X is F or Y or W
XZXCCZXXX

SEQ ID NO: 178 - protein, 9 aa, Artificial Sequence
  gluten peptide
  misc_feature (1)..(1): X is I or L or V
  misc_feature (6)..(7): X is I or L or V
XZZZPXXPZ

SEQ ID NO: 179 - protein, 9 aa, Artificial Sequence
  gluten peptide
  misc_feature (2)..(2): X is R or K or H
  misc_feature (5)..(5): X is F or Y or W
  misc_feature (6)..(6): X is S or T
ZXPPXXZZZ

SEQ ID NO: 180 - protein, 9 aa, Artificial Sequence
  gluten peptide
  misc_feature (2)..(2): X is I or L or V
  misc_feature (3)..(3): X is F or Y or W
  misc_feature (4)..(4): X is I or L or V
  misc_feature (9)..(9): X is I or L or V
MXXXZZZCX

SEQ ID NO: 181 - protein, 9 aa, Artificial Sequence
  gluten peptide
  misc_feature (4)..(4): X is R or K or H
  misc_feature (6)..(6): X is F or Y or W
  misc_feature (7)..(7): X is I or L or V
ZZZXPXXZP

SEQ ID NO: 182 - protein, 9 aa, Artificial Sequence
  gluten peptide
  misc_feature (1)..(1): X is S or T
  misc_feature (2)..(2): X is F or Y or W
  misc_feature (5)..(5): X is I or L or V
  misc_feature (9)..(9): X is I or L or V
XXPZXPGZX

SEQ ID NO: 183 - protein, 9 aa, Artificial Sequence
  gluten peptide
  misc_feature (1)..(1): X is I or L or V
  misc_feature (5)..(6): X is I or L or V
  misc_feature (9)..(9): X is I or L or V
XZZZXXPZX

SEQ ID NO: 184 - protein, 9 aa, Artificial Sequence
  gluten peptide
  misc_feature (3)..(3): X is F or Y or W
  misc_feature (4)..(4): X is I or L or V
  misc_feature (7)..(7): X is S or T
  misc_feature (8)..(8): X is I or L or V
PPXXZPXXZ

SEQ ID NO: 185 - protein, 9 aa, Artificial Sequence
  gluten peptide
  misc_feature (1)..(2): X is I or L or V
  misc_feature (8)..(8): X is F or Y or W
  misc_feature (9)..(9): X is S or T
XXPZZPAXX

SEQ ID NO: 186 - protein, 9 aa, Artificial Sequence
  gluten peptide
  misc_feature (7)..(7): X is I or L or V
PZPZZZXPZ

SEQ ID NO: 187 - protein, 9 aa, Artificial Sequence
  gluten peptide
  misc_feature (2)..(2): X is S or T
  misc_feature (7)..(7): X is I or L or V
GXANMZXDP

SEQ ID NO: 188 - protein, 9 aa, Artificial Sequence
  gluten peptide
  misc_feature (6)..(6): X is R or K or H
  misc_feature (7)..(7): X is I or L or V
  misc_feature (8)..(8): X is F or Y or W
  misc_feature (9)..(9): X is I or L or V
ZZZGMXXXX

SEQ ID NO: 189 - protein, 9 aa, Artificial Sequence
  gluten peptide
  misc_feature (1)..(1): X is R or K or H
  misc_feature (2)..(3): X is I or L or V
  misc_feature (4)..(4): X is R or K or H
  misc_feature (6)..(8): X is I or L or V
  misc_feature (9)..(9): X is R or K or H
XXXXAXXXX

SEQ ID NO: 190 - protein, 9 aa, Artificial Sequence
  gluten peptide
  misc_feature (1)..(1): X is I or L or V
  misc_feature (3)..(3): X is I or L or V
  misc_feature (4)..(4): X is F or Y or W
  misc_feature (6)..(9): X is S or T
XPXXGXXXX

SEQ ID NO: 191 - protein, 9 aa, Artificial Sequence
  gluten peptide
  misc_feature (4)..(4): X is I or L or V
PZZXGZZPZ

SEQ ID NO: 192 - protein, 9 aa, Artificial Sequence
  gluten peptide
  misc_feature (2)..(2): X is S or T
  misc_feature (7)..(8): X is I or L or V
ZXGZZZXXZ

SEQ ID NO: 193 - protein, 9 aa, Artificial Sequence
  gluten peptide
  misc_feature (1)..(1): X is F or Y or W
  misc_feature (5)..(5): X is I or L or V
  misc_feature (7)..(7): X is F or Y or W
XPPZXPXPZ

SEQ ID NO: 194 - protein, 9 aa, Artificial Sequence
  gluten peptide
  misc_feature (2)..(2): X is S or T
  misc_feature (4)..(4): X is I or L or V
  misc_feature (9)..(9): X is R or K or H
CXPXAMPZX

SEQ ID NO: 195 - protein, 9 aa, Artificial Sequence
  gluten peptide
  misc_feature (4)..(4): X is S or T
DZZXGZGZZ

SEQ ID NO: 196 - protein, 9 aa, Artificial Sequence
  gluten peptide
  misc_feature (2)..(2): X is I or L or V
  misc_feature (5)..(5): X is S or T
  misc_feature (6)..(7): X is I or L or V
  misc_feature (8)..(8): X is F or Y or W
ZXZZXXXXG

SEQ ID NO: 197 - protein, 9 aa, Artificial Sequence
  gluten peptide
  misc_feature (2)..(2): X is F or Y or W
  misc_feature (3)..(3): X is S or T
  misc_feature (7)..(7): X is I or L or V
  misc_feature (9)..(9): X is I or L or V
PXXZZZXPX

SEQ ID NO: 198 - protein, 9 aa, Artificial Sequence
  gluten peptide
  misc_feature (1)..(2): X is S or T
  misc_feature (3)..(3): X is R or K or H
  misc_feature (4)..(4): X is I or L or V
  misc_feature (7)..(7): X is I or L or V
  misc_feature (9)..(9): X is R or K or H
XXXXPGXZX

SEQ ID NO: 199 - protein, 9 aa, Artificial Sequence
  gluten peptide
  misc_feature (1)..(1): X is S or T
  misc_feature (2)..(2): X is I or L or V
  misc_feature (4)..(4): X is I or L or V
  misc_feature (5)..(5): X is R or K or H
  misc_feature (6)..(6): X is S or T
  misc_feature (7)..(7): X is I or L or V
XXAXXXXPM

SEQ ID NO: 200 - protein, 16 aa, Artificial Sequence
  gluten peptide
GQLPYPQPZLPYPQPG

SEQ ID NO: 201 - protein, 16 aa, Artificial Sequence
  gluten peptide
GQLPYPQPQLPYPQPG

SEQ ID NO: 202 - protein, 20 aa, Artificial Sequence
  gluten peptide
YLQLQPFPQPQLPYPQPQLP

SEQ ID NO: 203 - protein, 20 aa, Artificial Sequence
  gluten peptide
PQPFPPQLPYPQPQLPYPQP

SEQ ID NO: 204 - protein, 20 aa, Artificial Sequence
  gluten peptide
PYMQLQPFPQPQLPYPQPQL

SEQ ID NO: 205 - protein, 17 aa, Artificial Sequence
  gluten peptide
QLQPFPQPQLPYPQPQL

SEQ ID NO: 206 - protein, 16 aa, Artificial Sequence
  gluten peptide
GQLPYPQPELPYPQPG

SEQ ID NO: 207 - protein, 16 aa, Artificial Sequence
  gluten peptide
GQLPYPQPQLPYPQPG

SEQ ID NO: 208 - protein, 20 aa, Artificial Sequence
  gluten peptide
PQPFPPQLPYPQPQLPYPQP

SEQ ID NO: 209 - protein, 20 aa, Artificial Sequence
  gluten peptide
MQLQPFPQPQLPYPQPQLPY

SEQ ID NO: 210 - protein, 17 aa, Artificial Sequence
  gluten peptide
QLQPFPQPELPYPQPQL

SEQ ID NO: 211 - protein, 20 aa, Artificial Sequence
  gluten peptide
PQLPYPQPQLPYPQPQLPYP

SEQ ID NO: 212 - protein, 20 aa, Artificial Sequence
  gluten peptide
PQLPYPQPQLPYPQPQPFRP

SEQ ID NO: 213 - protein, 20 aa, Artificial Sequence
  gluten peptide
LQPFPQPELPYPQPELPYPF

SEQ ID NO: 214 - protein, 20 aa, Artificial Sequence
  gluten peptide
LQLQPFPQPQLPYPQPQLPY

SEQ ID NO: 215 - protein, 20 aa, Artificial Sequence
  gluten peptide
PQPFPPQLPYPQPQLPYPQP

SEQ ID NO: 216 - protein, 20 aa, Artificial Sequence
  gluten peptide
QPFPQPQQPFPWQPQQPFPQ

SEQ ID NO: 217 - protein, 20 aa, Artificial Sequence
  gluten peptide
PQQPQQPFPQPQQPFPWQPQ

SEQ ID NO: 218 - protein, 20 aa, Artificial Sequence
  gluten peptide
QPFPQPQQPFPWQPQQPFPQ

SEQ ID NO: 219 - protein, 20 aa, Artificial Sequence
  gluten peptide
QPFPQPQQPFPWQPQQPFPQ

SEQ ID NO: 220 - protein, 20 aa, Artificial Sequence
  gluten peptide
QQPFPQQPQQPFPQPQQPIP

SEQ ID NO: 221 - protein, 20 aa, Artificial Sequence
  gluten peptide
PQQPQQPFPQPQQPIPVQPQ

SEQ ID NO: 222 - protein, 20 aa, Artificial Sequence
  gluten peptide
PQQPQQPFPQPQQPIPVQPQ

SEQ ID NO: 223 - protein, 16 aa, Artificial Sequence
  gluten peptide
GQQPFPQPEQPIPVQG

SEQ ID NO: 224 - protein, 16 aa, Artificial Sequence
  gluten peptide
GQQPFPQPQQPIPVQG

SEQ ID NO: 225 - protein, 20 aa, Artificial Sequence
  gluten peptide
PQQPQQPFPQPQQPIPVQPQ

SEQ ID NO: 226 - protein, 20 aa, Artificial Sequence
  gluten peptide
QPFPQPQQPFPWQPQQPFPQ

SEQ ID NO: 227 - protein, 20 aa, Artificial Sequence
  gluten peptide
PQQPQQPFPQPQQPFPWQPQ

SEQ ID NO: 228 - protein, 20 aa, Artificial Sequence
  gluten peptide
PQQPQQPQQPFPQPQQPFPW

SEQ ID NO: 229 - protein, 20 aa, Artificial Sequence
  gluten peptide
QPFPQPQQPFPWQPQQPFPQ

SEQ ID NO: 230 - protein, 16 aa, Artificial Sequence
  gluten peptide
GQQPFPQPEQPFPWQG

SEQ ID NO: 231 - protein, 16 aa, Artificial Sequence
  gluten peptide
GQQPFPQPQQPFPWQG

SEQ ID NO: 232 - protein, 20 aa, Artificial Sequence
  gluten peptide
PQQPQQPQQPFPQPQQPFPW

SEQ ID NO: 233 - protein, 20 aa, Artificial Sequence
  gluten peptide
QPFPQPQQPFPWQPQQPFPQ

SEQ ID NO: 234 - protein, 17 aa, Artificial Sequence
  gluten peptide
QPQQPFPQPEQPFPWQP

SEQ ID NO: 235 - protein, 17 aa, Artificial Sequence
  gluten peptide
QPEQPFPQPEQPFPWQP

SEQ ID NO: 236 - protein, 17 aa, Artificial Sequence
  gluten peptide
QPQQPFPQPQQPFPWQP

SEQ ID NO: 237 - protein, 17 aa, Artificial Sequence
  gluten peptide
QPEQPFPQPQQPFPWQP

SEQ ID NO: 238 - protein, 20 aa, Artificial Sequence
  gluten peptide
YLQLQPFPQPQLPYPQPQLP

SEQ ID NO: 239 - protein, 20 aa, Artificial Sequence
  gluten peptide
PQPFPPQLPYPQPQLPYPQP

SEQ ID NO: 240 - protein, 20 aa, Artificial Sequence
  gluten peptide
PYMQLQPFPQPQLPYPQPQL

SEQ ID NO: 241 - protein, 17 aa, Artificial Sequence
  gluten peptide
QLQPFPQPQLPYPQPQL

SEQ ID NO: 242 - protein, 16 aa, Artificial Sequence
  gluten peptide
GQLPYPQPELPYPQPG

SEQ ID NO: 243 - protein, 16 aa, Artificial Sequence
  gluten peptide
GLQPFPQPELPYPQPG

SEQ ID NO: 244 - protein, 20 aa, Artificial Sequence
  gluten peptide
LQLQPFPQPQLPYPQPQPFR

SEQ ID NO: 245 - protein, 17 aa, Artificial Sequence
  gluten peptide
QLQPFPQPELPYPQPQP

SEQ ID NO: 246 - protein, 16 aa, Artificial Sequence
  gluten peptide
GQLPYPQPQLPYPQPG

SEQ ID NO: 247 - protein, 20 aa, Artificial Sequence
  gluten peptide
PQPFPPQLPYPQPQLPYPQP

SEQ ID NO: 248 - protein, 20 aa, Artificial Sequence
  gluten peptide
LQLQPFPQPQLPYPQPQPFR

SEQ ID NO: 249 - protein, 33 aa, Artificial Sequence
  gluten peptide
LQLQPFPQPELPYPQPELPYPQPELPYPQPQPF

SEQ ID NO: 250 - protein, 20 aa, Artificial Sequence
  gluten peptide
MQLQPFPQPQLPYPQPQLPY

SEQ ID NO: 251 - protein, 16 aa, Artificial Sequence
  gluten peptide
GLQPFPQPELPFPQPG

SEQ ID NO: 252 - protein, 17 aa, Artificial Sequence
  gluten peptide
QLQPFPQPELPYPQPQL

SEQ ID NO: 253 - protein, 20 aa, Artificial Sequence
  gluten peptide
PQLPYPQPQLPYPQPQLPYP

SEQ ID NO: 254 - protein, 17 aa, Artificial Sequence
  gluten peptide
QLQPFPQPQLPYPQPQP

SEQ ID NO: 255 - protein, 16 aa, Artificial Sequence
  gluten peptide
GLQPFPQPQLPYPQPG

SEQ ID NO: 256 - protein, 20 aa, Artificial Sequence
  gluten peptide
PQLPYPQPQLPYPQPQPFRP

SEQ ID NO: 257 - protein, 20 aa, Artificial Sequence
  gluten peptide
LQPFPQPELPYPQPELPYPF

SEQ ID NO: 258 - protein, 20 aa, Artificial Sequence
  gluten peptide
LQLQPFPQPQLPYPQPQLPY

SEQ ID NO: 259 - protein, 16 aa, Artificial Sequence
  gluten peptide
GLQPFPQPQLPFPQPG

SEQ ID NO: 260 - protein, 20 aa, Artificial Sequence
  gluten peptide
PQPFPPQLPYPQPQLPYPQP

SEQ ID NO: 261 - protein, 20 aa, Artificial Sequence
  gluten peptide
YPQPQLPYPQPQPFRPQQSY

SEQ ID NO: 262 - protein, 15 aa, Artificial Sequence
  gluten peptide
GSGQPELPYPQPGSG

SEQ ID NO: 263 - protein, 33 aa, Artificial Sequence
  gluten peptide
LQLQPFPQPQLPYPQPQLPYPQPQLPYPQPQPF

SEQ ID NO: 264 - protein, 20 aa, Artificial Sequence
  gluten peptide
QQPQQPFPQPQLPFPQQSEQ

SEQ ID NO: 265 - protein, 20 aa, Artificial Sequence
  gluten peptide
FPQQPQQPFPQPQLPFPQQS

SEQ ID NO: 266 - protein, 16 aa, Artificial Sequence
  gluten peptide
GQQPFPQPEQPFSQQG

SEQ ID NO: 267 - protein, 16 aa, Artificial Sequence
  gluten peptide
GQQPFPQPQQPFSQQG

SEQ ID NO: 268 - protein, 15 aa, Artificial Sequence
  gluten peptide
GSGFPQPELPYPGSG

SEQ ID NO: 269 - protein, 20 aa, Artificial Sequence
  gluten peptide
QPQLPFPQQPQQQPQQPFPQ

SEQ ID NO: 270 - protein, 16 aa, Artificial Sequence
  gluten peptide
GQQPQQQPEQPFPQQG

SEQ ID NO: 271 - protein, 16 aa, Artificial Sequence
  gluten peptide
GQQPQQQPQQPFPQQG

SEQ ID NO: 272 - protein, 20 aa, Artificial Sequence
  gluten peptide
LQQPQQPFPQPQQQLPQPQQ

SEQ ID NO: 273 - protein, 20 aa, Artificial Sequence
  gluten peptide
LQQPQQPFPQPQQQLPQPQQ

SEQ ID NO: 274 - protein, 20 aa, Artificial Sequence
  gluten peptide
QPQQPFPQLQQPQQPFPQPQ

SEQ ID NO: 275 - protein, 20 aa, Artificial Sequence
  gluten peptide
PFPQLQQPQQPFPQPQQQLP

SEQ ID NO: 276 - protein, 16 aa, Artificial Sequence
  gluten peptide
GFPQLQQPEQPFPQQG

SEQ ID NO: 277 - protein, 16 aa, Artificial Sequence
  gluten peptide
GFPQLQQPQQPFPQQG

SEQ ID NO: 278 - protein, 20 aa, Artificial Sequence
  gluten peptide
LQPFPQPQPFLPQLPYPQPQ

SEQ ID NO: 279 - protein, 20 aa, Artificial Sequence
  gluten peptide
LQLQPFPQPQPFLPQLPYPQ

SEQ ID NO: 280 - protein, 20 aa, Artificial Sequence
  gluten peptide
LQQILQQQLTPCMDVVLQQH

SEQ ID NO: 281 - protein, 20 aa, Artificial Sequence
  gluten peptide
ILQQILQQQLTPCMDVVLQQ

SEQ ID NO: 282 - protein, 20 aa, Artificial Sequence
  gluten peptide
QSPQQSFSYQQQPFPQQPYP

SEQ ID NO: 283 - protein, 20 aa, Artificial Sequence
  gluten peptide
YQQQPFPQQPYPQQPYPSQQ

SEQ ID NO: 284 - protein, 20 aa, Artificial Sequence
  gluten peptide
PQQSFSYQQQPFPQQPYPQQ

SEQ ID NO: 285 - protein, 20 aa, Artificial Sequence
  gluten peptide
YLQLQPFPQPQLPYPQPQLP

SEQ ID NO: 286 - protein, 20 aa, Artificial Sequence
  gluten peptide
PYMQLQPFPQPQLPYPQPQL

SEQ ID NO: 287 - protein, 17 aa, Artificial Sequence
  gluten peptide
QLQPFPQPQLPYPQPQL

SEQ ID NO: 288 - protein, 16 aa, Artificial Sequence
  gluten peptide
GLQPFPQPELPYPQPG

SEQ ID NO: 289 - protein, 20 aa, Artificial Sequence
  gluten peptide
LQLQPFPQPQLPYPQPQPFR

SEQ ID NO: 290 - protein, 17 aa, Artificial Sequence
  gluten peptide
QLQPFPQPELPYPQPQP

SEQ ID NO: 291 - protein, 20 aa, Artificial Sequence
  gluten peptide
LQLQPFPQPQLPYPQPQPFR

SEQ ID NO: 292 - protein, 33 aa, Artificial Sequence; identical to SEQ ID NO: 249
  gluten peptide

SEQ ID NO: 293 - protein, 20 aa, Artificial Sequence
  gluten peptide
MQLQPFPQPQLPYPQPQLPY

SEQ ID NO: 294 - protein, 16 aa, Artificial Sequence
  gluten peptide
GLQPFPQPELPFPQPG

SEQ ID NO: 295 - protein, 17 aa, Artificial Sequence
  gluten peptide
QLQPFPQPELPYPQPQL

SEQ ID NO: 296 - protein, 17 aa, Artificial Sequence
  gluten peptide
QLQPFPQPQLPYPQPQP

SEQ ID NO: 297 - protein, 16 aa, Artificial Sequence
  gluten peptide
GLQPFPQPQLPYPQPG

SEQ ID NO: 298 - protein, 20 aa, Artificial Sequence
  gluten peptide
LQPFPQPELPYPQPELPYPF

SEQ ID NO: 299 - protein, 20 aa, Artificial Sequence
  gluten peptide
QQPQQPFPQPQLPFPQQSEQ

SEQ ID NO: 300 - protein, 20 aa, Artificial Sequence
  gluten peptide
LQLQPFPQPQLPYPQPQLPY

SEQ ID NO: 301 - protein, 20 aa, Artificial Sequence
  gluten peptide
FPQQPQQPFPQPQLPFPQQS

SEQ ID NO: 302 - protein, 16 aa, Artificial Sequence
  gluten peptide
GLQPFPQPQLPFPQPG

SEQ ID NO: 303 - protein, 16 aa, Artificial Sequence
  gluten peptide
GLQPFPQPELPYLQPG

SEQ ID NO: 304 - protein, 20 aa, Artificial Sequence
  gluten peptide
PYLQLQPFPQPQLPYSQPQP

SEQ ID NO: 305 - protein, 16 aa, Artificial Sequence
  gluten peptide
GLQPFPQPELPYSQPG

SEQ ID NO: 306 - protein, 20 aa, Artificial Sequence
  gluten peptide
LQLQPFPQPQLPYLQPQPFR

SEQ ID NO: 307 - protein, 20 aa, Artificial Sequence
  gluten peptide
LQLQPFPQPQLPYLQPQPFR

SEQ ID NO: 308 - protein, 20 aa, Artificial Sequence
  gluten peptide
LQLQPFPQPQLPYSQPQPFR

SEQ ID NO: 309 - protein, 15 aa, Artificial Sequence
  gluten peptide
GSGQPFPQPELPGSG

SEQ ID NO: 310 - protein, 33 aa, Artificial Sequence; identical to SEQ ID NO: 263
  gluten peptide

SEQ ID NO: 311 - protein, 16 aa, Artificial Sequence
  gluten peptide
GLQPFPQPQLPYSQPG

SEQ ID NO: 312 - protein, 20 aa, Artificial Sequence
  gluten peptide
QPFPQPQLPYSQPQQFRPQQ

SEQ ID NO: 313 - protein, 20 aa, Artificial Sequence
  gluten peptide
LQLQPFPQPQLPYSQPQQFR

SEQ ID NO: 314 - protein, 16 aa, Artificial Sequence
  gluten peptide
GLQPFPQPQLPYLQPG

SEQ ID NO: 315 - protein, 20 aa, Artificial Sequence
  gluten peptide
QFPSQLPYLQLQPFPQPQLP

SEQ ID NO: 316 - protein, 20 aa, Artificial Sequence
  gluten peptide
PFPSQQPYMQLQPFPQPQLP

SEQ ID NO: 317 - protein, 20 aa, Artificial Sequence
  gluten peptide
PFPSQLPYLQLQPFPQPQLP

SEQ ID NO: 318 - protein, 20 aa, Artificial Sequence
  gluten peptide
PFPSQQPYLQLQPFPQPQLP

SEQ ID NO: 319 - protein, 20 aa, Artificial Sequence
  gluten peptide
PFPSQQPYLQLQPFPQPQLP

SEQ ID NO: 320 - protein, 20 aa, Artificial Sequence
  gluten peptide
PQQPFPQQPQQQFPQPQQPQ

SEQ ID NO: 321 - protein, 16 aa, Artificial Sequence
  gluten peptide
GQPFPQQPEQEFPQPG

SEQ ID NO: 322 - protein, 20 aa, Artificial Sequence
  gluten peptide
QQPQQPFPQQPQQQFPQPQQ

SEQ ID NO: 323 - protein, 16 aa, Artificial Sequence
  gluten peptide
GQPFPQQPEQQFPQPG

SEQ ID NO: 324 - protein, 16 aa, Artificial Sequence
  gluten peptide
GFPQQPEQEFPQPQQG

SEQ ID NO: 325 - protein, 20 aa, Artificial Sequence
  gluten peptide
PQQPFPQQPQQQFPQPQQPQ

SEQ ID NO: 326 - protein, 16 aa, Artificial Sequence
  gluten peptide
GFPQQPQQEFPQPQQG

SEQ ID NO: 327 - protein, 16 aa, Artificial Sequence
  gluten peptide
GQPFPQQPQQQFPQPG

SEQ ID NO: 328 - protein, 20 aa, Artificial Sequence
  gluten peptide
QQPQQPFPQQPQQQFPQPQQ

SEQ ID NO: 329 - protein, 20 aa, Artificial Sequence
  gluten peptide
PQQPQQPFPQQPQQQFPQPQ

SEQ ID NO: 330 - protein, 16 aa, Artificial Sequence
  gluten peptide
GFPQQPQQQFPQPQQG

SEQ ID NO: 331 - protein, 16 aa, Artificial Sequence
  gluten peptide
GQPPFSQQEQPVLPQG

SEQ ID NO: 332 - protein, 20 aa, Artificial Sequence
  gluten peptide
LQQSPFSQQQQPVLPQQQPV

SEQ ID NO: 333 - protein, 20 aa, Artificial Sequence
  gluten peptide
PFSQQQQPPFSQQQQPVLPQ

SEQ ID NO: 334 - protein, 20 aa, Artificial Sequence
  gluten peptide
QQQPILSQQPPFSQQQQPVL

SEQ ID NO: 335 - protein, 20 aa, Artificial Sequence
  gluten peptide
QPPFSQQQQPVLPQQSPFSQ

SEQ ID NO: 336 - protein, 20 aa, Artificial Sequence
  gluten peptide
QQQVLPQQPPFSQQQQPVLL

SEQ ID NO: 337 - protein, 20 aa, Artificial Sequence
  gluten peptide
QQQPILSQQPPFSQQQQPVL

SEQ ID NO: 338 - protein, 20 aa, Artificial Sequence
  gluten peptide
QQQPPFSQQQQPILPQQPPF

SEQ ID NO: 339 - protein, 20 aa, Artificial Sequence
  gluten peptide
PFSQQQPPFSQQQQPILPQQ

SEQ ID NO: 340 - protein, 20 aa, Artificial Sequence
  gluten peptide
QQQPILPQLPFSQQQQPVLP

SEQ ID NO: 341 - protein, 20 aa, Artificial Sequence
  gluten peptide
QQPPFSQQQQPVLPPQQSPF

SEQ ID NO: 342 - protein, 16 aa, Artificial Sequence
  gluten peptide
GQPPFSQQQQPVLPQG

SEQ ID NO: 343 - protein, 20 aa, Artificial Sequence
  gluten peptide
QSPFSQQQQPVLPQQQPVII

SEQ ID NO: 344 - protein, 20 aa, Artificial Sequence
  gluten peptide
QPPFSQQQQPVLPQQSPFSQ

SEQ ID NO: 345 - protein, 20 aa, Artificial Sequence
  gluten peptide
QQQPPFSQQQQPVIPQQPSF

SEQ ID NO: 346 - protein, 20 aa, Artificial Sequence
  gluten peptide
LPPFSQQLPPFSQQQQPVLP

SEQ ID NO: 347 - protein, 20 aa, Artificial Sequence
  gluten peptide
QQQQPPFSQQQQPVLPQQSP

SEQ ID NO: 348 - protein, 20 aa, Artificial Sequence
  gluten peptide
SQQQPILSQQPPFSQQQQPV

SEQ ID NO: 349 - protein, 20 aa, Artificial Sequence
  gluten peptide
PFSQQQQPVLLQQQIPFVHP

SEQ ID NO: 350 - protein, 20 aa, Artificial Sequence
  gluten peptide
FTQPQQPTPIQPQQPFPQQP

SEQ ID NO: 351 - protein, 20 aa, Artificial Sequence
  gluten peptide
PFTQPQQPTPIQPQQPFPQQ

SEQ ID NO: 352 - protein, 20 aa, Artificial Sequence
  gluten peptide
FPEQSQQPFTQPQQPTPIQP

SEQ ID NO: 353 - protein, 20 aa, Artificial Sequence
  gluten peptide
PQQPQQPFPQPQQPIPVQPQ

SEQ ID NO: 354 - protein, 20 aa, Artificial Sequence
  gluten peptide
PQQPQQPFPQPQQPIPVQPQ

SEQ ID NO: 355 - protein, 16 aa, Artificial Sequence
  gluten peptide
GQQPFPQPEQPIPVQG

SEQ ID NO: 356 - protein, 16 aa, Artificial Sequence
  gluten peptide
GQQPFPQPQQPIPVQG

SEQ ID NO: 357 - protein, 20 aa, Artificial Sequence
  gluten peptide
PQQPQQPFPQPQQPIPVQPQ

SEQ ID NO: 358 - protein, 20 aa, Artificial Sequence
  gluten peptide
PQPQQPIPVQPQQSFPQQSQ

SEQ ID NO: 359 - protein, 20 aa, Artificial Sequence
  gluten peptide
QPQQPIPVQPQQSFPQQSQQ

SEQ ID NO: 360 - protein, 20 aa, Artificial Sequence
  gluten peptide
QQPFPQPQQPQLPFPQQPQQ

SEQ ID NO: 361 - protein, 20 aa, Artificial Sequence
  gluten peptide
QPQQPQQPFPQPQQPQLPFP

SEQ ID NO: 362 - protein, 20 aa, Artificial Sequence
  gluten peptide
QQPQQPFPQPQQPQLPFPQQ

SEQ ID NO: 363 - protein, 20 aa, Artificial Sequence
  gluten peptide
QQPQQPFPQPQQPQLPFPQQ

SEQ ID NO: 364 - protein, 20 aa, Artificial Sequence
  gluten peptide
PQPQQPQLPFPQQPQQPFPQ

SEQ ID NO: 365 - protein, 20 aa, Artificial Sequence
  gluten peptide
PQQPFPQPQQPQLPFPQQPQ

SEQ ID NO: 366 - protein, 16 aa, Artificial Sequence
  gluten peptide
GQQPFPQPEQPQLPFG

SEQ ID NO: 367 - protein, 20 aa, Artificial Sequence
  gluten peptide
QQPFPQPQQPQLPFPQQPQQ

SEQ ID NO: 368 - protein, 16 aa, Artificial Sequence
  gluten peptide
GQQPFPQPQQPQLPFG

SEQ ID NO: 369 - protein, 16 aa, Artificial Sequence
  gluten peptide
GFPQPQQPELPFPQQG

SEQ ID NO: 370 - protein, 16 aa, Artificial Sequence
  gluten peptide
GFPQPQQPQLPFPQQG

SEQ ID NO: 371 - protein, 15 aa, Artificial Sequence
  gluten peptide
GSGPQPELPYPQGSG

SEQ ID NO: 372 - protein, 15 aa, Artificial Sequence
  gluten peptide
GSGPFPQPELPYGSG

SEQ ID NO: 373 - protein, 16 aa, Artificial Sequence
  gluten peptide
GQQPFPQPEQPFCQQG

SEQ ID NO: 374 - protein, 16 aa, Artificial Sequence
  gluten peptide
GQQPFPQPQQPFCQQG

SEQ ID NO: 375 - protein, 16 aa, Artificial Sequence
  gluten peptide
GFFPQPEQEFPQPQQG

SEQ ID NO: 376 - protein, 16 aa, Artificial Sequence
  gluten peptide
GQQPFPQPEQEFPQPG

SEQ ID NO: 377 - protein, 20 aa, Artificial Sequence
  gluten peptide
SQQPQQPFPQPQQQFPQPQQ

SEQ ID NO: 378 - protein, 16 aa, Artificial Sequence
  gluten peptide
GQQPFPQPEQQFPQPG

SEQ ID NO: 379 - protein, 20 aa, Artificial Sequence
  gluten peptide
SQQPQQPFPQPQQQFPQPQQ

SEQ ID NO: 380 - protein, 20 aa, Artificial Sequence
  gluten peptide
QPFPQPQQQFPQPQQPQQSF

SEQ ID NO: 381 - protein, 16 aa, Artificial Sequence
  gluten peptide
GFFPQPQQEFPQPQQG

SEQ ID NO: 382 - protein, 20 aa, Artificial Sequence
  gluten peptide
SQQPQQPFPQPQQQFPQPQQ

SEQ ID NO: 383 - protein, 16 aa, Artificial Sequence
  gluten peptide
GFFPQPQQQFPQPQQG

SEQ ID NO: 384 - protein, 16 aa, Artificial Sequence
  gluten peptide
GQQPFPQPQQQFPQPG

SEQ ID NO: 385 - protein, 16 aa, Artificial Sequence
  gluten peptide
GQPTPIQPEQPFPQQG

SEQ ID NO: 386 - protein, 16 aa, Artificial Sequence
  gluten peptide
GQPTPIQPQQPFPQQG

SEQ ID NO: 387 - protein, 20 aa, Artificial Sequence
  gluten peptide
LQPFPQPQPFLPQLPYPQPQ

SEQ ID NO: 388 - protein, 20 aa, Artificial Sequence
  gluten peptide
FLPQLPYPQPQSFPPQQPYP

SEQ ID NO: 389 - protein, 16 aa, Artificial Sequence
  gluten peptide
GQPQPFLPELPYPQPG

SEQ ID NO: 390 - protein, 20 aa, Artificial Sequence
  gluten peptide
PQPFLPQLPYPQPQSFPPQQ

SEQ ID NO: 391 - protein, 20 aa, Artificial Sequence
  gluten peptide
PQPFLPQLPYPQPQSFPPQQ

SEQ ID NO: 392 - protein, 16 aa, Artificial Sequence
  gluten peptide
GQPQPFLPQLPYPQPG

SEQ ID NO: 393 - protein, 20 aa, Artificial Sequence
  gluten peptide
LQLQPFPQPQPFLPQLPYPQ

SEQ ID NO: 394 - protein, 20 aa, Artificial Sequence
  gluten peptide
SVLQQLNPCKVFLQQQCSHV

SEQ ID NO: 395 - protein, 20 aa, Artificial Sequence
  gluten peptide
KVFLQQQCSHVAMSQRLARP

SEQ ID NO: 396 - protein, 20 aa, Artificial Sequence
  gluten peptide
QPFPQPQQPFPWQPQQPFPQ

SEQ ID NO: 397 - protein, 20 aa, Artificial Sequence
  gluten peptide
PQQPQQPFPQPQQPFPWQPQ

SEQ ID NO: 398 - protein, 20 aa, Artificial Sequence
  gluten peptide
PQQPQQPQQPFPQPQQPFPW

SEQ ID NO: 399 - protein, 20 aa, Artificial Sequence
  gluten peptide
QPFPQPQQPFPWQPQQPFPQ

SEQ ID NO: 400 - protein, 16 aa, Artificial Sequence
  gluten peptide
GQQPFPQPEQPFPWQG

SEQ ID NO: 401 - protein, 16 aa, Artificial Sequence
  gluten peptide
GQQPFPQPQQPFPWQG

SEQ ID NO: 402 - protein, 20 aa, Artificial Sequence
  gluten peptide
PQQPQQPQQPFPQPQQPFPW

SEQ ID NO: 403 - protein, 20 aa, Artificial Sequence
  gluten peptide
QPFPQPQQPFPWQPQQPFPQ

SEQ ID NO: 404 - protein, 17 aa, Artificial Sequence
  gluten peptide
QPQQPFPQPEQPFPWQP

SEQ ID NO: 405 - protein, 17 aa, Artificial Sequence
  gluten peptide
QPEQPFPQPEQPFPWQP

SEQ ID NO: 406 - protein, 16 aa, Artificial Sequence
  gluten peptide
GQQPFPQPEQPFSQQG

SEQ ID NO: 407 - protein, 16 aa, Artificial Sequence
  gluten peptide
GQQPFPQPEQPFCQQG

SEQ ID NO: 408 - protein, 16 aa, Artificial Sequence
  gluten peptide
GQQPFPQPQQPFSQQG

SEQ ID NO: 409 - protein, 20 aa, Artificial Sequence
  gluten peptide
GQVQWPQQQPFPQPQQPFCE

SEQ ID NO: 410 - protein, 20 aa, Artificial Sequence
  gluten peptide
PQQQQPFPQPQQPFSQQPQQ

SEQ ID NO: 411 - protein, 20 aa, Artificial Sequence
  gluten peptide
WPQQQPFPQPQQPFCQQPQQ

SEQ ID NO: 412 - protein, 20 aa, Artificial Sequence
  gluten peptide
PSGQVQWPQQQPFPQPQQPF

SEQ ID NO: 413 - protein, 16 aa, Artificial Sequence
  gluten peptide
GQQPFPQPQQPFCQQG

SEQ ID NO: 414 - protein, 20 aa, Artificial Sequence
  gluten peptide
PQQQPFPQPQQPFCEQPQRT

SEQ ID NO: 415 - protein, 17 aa, Artificial Sequence
  gluten peptide
QPQQPFPQPQQPFPWQP

SEQ ID NO: 416 - protein, 17 aa, Artificial Sequence
  gluten peptide
QPEQPFPQPQQPFPWQP

SEQ ID NO: 417 - protein, 20 aa, Artificial Sequence
  gluten peptide
QQQPFPQPQQPFCQQPQRTI

SEQ ID NO: 418 - protein, 20 aa, Artificial Sequence
  gluten peptide
QQQQPFPQPQQPFSQQPQQI

SEQ ID NO: 419 - protein, 20 aa, Artificial Sequence
  gluten peptide
QQQPFPQPQQPFCEQPQRTI

SEQ ID NO: 420 - protein, 20 aa, Artificial Sequence
  gluten peptide
QQFLQPQQPFPQQPQQPYPQ

SEQ ID NO: 421 - protein, 16 aa, Artificial Sequence
  gluten peptide
GQQQFIQPEQPFPQQG

SEQ ID NO: 422 - protein, 20 aa, Artificial Sequence
  gluten peptide
PQQQFIQPQQPFPQQPQQTY

SEQ ID NO: 423 - protein, 16 aa, Artificial Sequence
  gluten peptide
GQQQFIQPQQPFPQQG

SEQ ID NO: 424 - protein, 20 aa, Artificial Sequence
  gluten peptide
QQQFIQPQQPFPQQPQQTYP

SEQ ID NO: 425 - protein, 20 aa, Artificial Sequence
  gluten peptide
FSQPQQPQQQFIQPQQPFPQ

SEQ ID NO: 426 - protein, 20 aa, Artificial Sequence
  gluten peptide
PQQQFIQPQQPFPQQPQQTY

SEQ ID NO: 427 - protein, 20 aa, Artificial Sequence
  gluten peptide
PQQPFLQPQQPFPQQPQQPF

SEQ ID NO: 428 - protein, 20 aa, Artificial Sequence
  gluten peptide
PQQQFLQPQQPFPQQPRQPY

SEQ ID NO: 429 - protein, 20 aa, Artificial Sequence
  gluten peptide
PQQQFLQPQQPFPQQPQQPY

SEQ ID NO: 430 - protein, 20 aa, Artificial Sequence
  gluten peptide
GQQPQQQQLAHGTFLQPHKI

SEQ ID NO: 431 - protein, 20 aa, Artificial Sequence
  gluten peptide
QQPQQQQLAHGTFLQPHQIA

SEQ ID NO: 432 - protein, 20 aa, Artificial Sequence
  gluten peptide
PQQPQQPFPQPQQPFPWQPQ

SEQ ID NO: 433 - protein, 20 aa, Artificial Sequence
  gluten peptide
PQQPQQPQQPFPQPQQPFPW

SEQ ID NO: 434 - protein, 20 aa, Artificial Sequence
  gluten peptide
QQPFPQQPQQPFPQPQQPIP

SEQ ID NO: 435 - protein, 20 aa, Artificial Sequence
  gluten peptide
PQQPQQPFPQPQQPIPVQPQ

SEQ ID NO: 436 - protein, 20 aa, Artificial Sequence
  gluten peptide
PQQPQQPFPQPQQPIPVQPQ

SEQ ID NO: 437 - protein, 20 aa, Artificial Sequence
  gluten peptide
PQQPQQPQQPFPQPQQPFPW

SEQ ID NO: 438 - protein, 20 aa, Artificial Sequence
  gluten peptide
QQPQQPFPQPQLPFPQQSEQ

SEQ ID NO: 439 - protein, 17 aa, Artificial Sequence
  gluten peptide
QPQQPFPQPEQPFPWQP

SEQ ID NO: 440 - protein, 20 aa, Artificial Sequence
  gluten peptide
LQQPQQPFPQPQQQLPQPQQ

SEQ ID NO: 441 - protein, 17 aa, Artificial Sequence
  gluten peptide
QPEQPFPQPEQPFPWQP

SEQ ID NO: 442 - protein, 20 aa, Artificial Sequence
  gluten peptide
FPQQPQQPFPQPQLPFPQQS

SEQ ID NO: 443 - protein, 20 aa, Artificial Sequence
  gluten peptide
PQQPQQPFPQPQQPIPVQPQ

SEQ ID NO: 444 - protein, 20 aa, Artificial Sequence
  gluten peptide
PLQPQQPFPQQPQQPFPQPQ

SEQ ID NO: 445 - protein, 20 aa, Artificial Sequence
  gluten peptide
SQQPQQPFPQPQQQFPQPQQ

SEQ ID NO: 446 - protein, 20 aa, Artificial Sequence
  gluten peptide
SQQPQQPFPQPQQQFPQPQQ

SEQ ID NO: 447 - protein, 20 aa, Artificial Sequence
  gluten peptide
PQQPFPQPQQPQQPFPQPQQ

SEQ ID NO: 448 - protein, 20 aa, Artificial Sequence
  gluten peptide
QLPFPQQPQQPFPQPQQPQQ

SEQ ID NO: 449 - protein, 20 aa, Artificial Sequence
  gluten peptide
HQPQQQFPQTQQPQQPFPQP

SEQ ID NO: 450 - protein, 20 aa, Artificial Sequence
  gluten peptide
PQTQQPQQPFPQPQQTFPQQ

SEQ ID NO: 451 - protein, 20 aa, Artificial Sequence
  gluten peptide
QPQQPQQPFPQPQQPQLPFP

SEQ ID NO: 452 - protein, 20 aa, Artificial Sequence
  gluten peptide
PQQPFPQQPQQPQQPFPQPQ

SEQ ID NO: 453 - protein, 20 aa, Artificial Sequence
  gluten peptide
QQPQQPFPQPQQPQLPFPQQ

SEQ ID NO: 454 - protein, 20 aa, Artificial Sequence
  gluten peptide
SQQPQQPFPQPQQPQQSFPQ

SEQ ID NO: 455 - protein, 20 aa, Artificial Sequence
  gluten peptide
QQQQPFPQPQQPQQPFPQPQ

SEQ ID NO: 456 - protein, 20 aa, Artificial Sequence
  gluten peptide
QQPQQPFPQPQQPQLPFPQQ

SEQ ID NO: 457 - protein, 20 aa, Artificial Sequence
  gluten peptide
PQQPQQPFPQPQQAQLPFPQ

SEQ ID NO: 458 - protein, 20 aa, Artificial Sequence
  gluten peptide
LQQPQQPFPQPQQQLPQPQQ

SEQ ID NO: 459 - protein, 20 aa, Artificial Sequence
  gluten peptide
QPQQPFPQSQQPQQPFPQPQ

SEQ ID NO: 460 - protein, 20 aa, Artificial Sequence
  gluten peptide
QPQQPFPQLQQPQQPFPQPQ

SEQ ID NO: 461 - protein, 17 aa, Artificial Sequence
  gluten peptide
QPQQPFPQPQQPFPWQP

SEQ ID NO: 462 - protein, 20 aa, Artificial Sequence
  gluten peptide
SKQPQQPFPQPQQPQQSFPQ

SEQ ID NO: 463 - protein, 20 aa, Artificial Sequence
  gluten peptide
SQQPQQPFPQPQQQFPQPQQ

SEQ ID NO: 464 - protein, 17 aa, Artificial Sequence
  gluten peptide
QPEQPFPQPQQPFPWQP

SEQ ID NO: 465 - protein, 20 aa, Artificial Sequence
  gluten peptide
PFPQLQQPQQPFPQPQQQLP

SEQ ID NO: 466 - protein, 20 aa, Artificial Sequence
  gluten peptide
QSKQPQQPFPQPQQPQQSFP

SEQ ID NO: 467 - protein, 20 aa, Artificial Sequence
  gluten peptide
FPLQPQQPFPQQPQQPFPQP

SEQ ID NO: 468 - protein, 20 aa, Artificial Sequence
  gluten peptide
QQPQQQFPQPQQPQQPFPQP

SEQ ID NO: 469 - protein, 20 aa, Artificial Sequence
  gluten peptide
QPQQPFPQSQQPQQPFPQPQ

SEQ ID NO: 470 - protein, 20 aa, Artificial Sequence
  gluten peptide
QPQQPFPQSKQPQQPFPQPQ

SEQ ID NO: 471 - protein, 20 aa, Artificial Sequence
  gluten peptide
PLQPQQPFPQQPQQPFPQPQ

SEQ ID NO: 472 - protein, 20 aa, Artificial Sequence
  gluten peptide
QQFPQTQQPQQPFPQPQQTF

SEQ ID NO: 473 - protein, 20 aa, Artificial Sequence
  gluten peptide
QQPQQPFPQSKQPQQPFPQP

SEQ ID NO: 474 - protein, 20 aa, Artificial Sequence
  gluten peptide
PQQPQQPFPLQPQQPFPQQP

SEQ ID NO: 475 - protein, 16 aa, Artificial Sequence
  gluten peptide
GQPFPLQPEQPFPQQG

SEQ ID NO: 476 - protein, 20 aa, Artificial Sequence
  gluten peptide
PQQPQQPFPLQPQQPFPQQP

SEQ ID NO: 477 - protein, 16 aa, Artificial Sequence
  gluten peptide
GQPFPLQPQQPFPQQG

SEQ ID NO: 478 - protein, 20 aa, Artificial Sequence
  gluten peptide
PQQLQQPFPLQPQQPFPQQP

SEQ ID NO: 479 - protein, 20 aa, Artificial Sequence
  gluten peptide
PQQPQQPFPLQPQQPFPQQP

SEQ ID NO: 480 - protein, 20 aa, Artificial Sequence
  gluten peptide
SEQIIPQQLQQPFPLQPQQP

SEQ ID NO: 481 - protein, 16 aa, Artificial Sequence
  gluten peptide
GQTFPHQPEQAFPQPG

SEQ ID NO: 482 - protein, 20 aa, Artificial Sequence
  gluten peptide
QTFPHQPQQAFPQPQQTFPH

SEQ ID NO: 483 - protein, 16 aa, Artificial Sequence
  gluten peptide
GQTFPHQPQQAFPQPG

SEQ ID NO: 484 - protein, 20 aa, Artificial Sequence
  gluten peptide
PQQTFPHQPQQAFPQPQQTF

SEQ ID NO: 485 - protein, 20 aa, Artificial Sequence
  gluten peptide
PPQQPYPQPQFPSQLPYLQL

SEQ ID NO: 486 - protein, 20 aa, Artificial Sequence
  gluten peptide
QQPYPQPQFPSQLPYLQLQP

SEQ ID NO: 487 - protein, 20 aa, Artificial Sequence
  gluten peptide
LQQPQQPFPQPQQQLPQPQQ

SEQ ID NO: 488 - protein, 16 aa, Artificial Sequence
  gluten peptide
GQQPFPQPEQQLPQPG

SEQ ID NO: 489 - protein, 20 aa, Artificial Sequence
  gluten peptide
LQQPQQPFPQPQQQLPQPQQ

SEQ ID NO: 490 - protein, 20 aa, Artificial Sequence
  gluten peptide
PFPQLQQPQQPFPQPQQQLP

SEQ ID NO: 491 - protein, 16 aa, Artificial Sequence
  gluten peptide
GQQPFPQPQQQLPQPG

SEQ ID NO: 492 - protein, 20 aa, Artificial Sequence
  gluten peptide
QPFPQPQQQLPQPQQPQQSF

SEQ ID NO: 493 - protein, 20 aa, Artificial Sequence
  gluten peptide
PQPFPPQLPYPQPQLPYPQP

SEQ ID NO: 494 - protein, 20 aa, Artificial Sequence
  gluten peptide
PQPFPPQLPYPQPQLPYPQP

SEQ ID NO: 495 - protein, 20 aa, Artificial Sequence
  gluten peptide
QPFPPQLPYPQPQPFRPQQP

SEQ ID NO: 496 - protein, 20 aa, Artificial Sequence
  gluten peptide
PQPFPPQLPYPQPQLPYPQP

SEQ ID NO: 497 - protein, 20 aa, Artificial Sequence
  gluten peptide
PQPFPPQLPYPQPQPFRPQQ

SEQ ID NO: 498 - protein, 20 aa, Artificial Sequence
  gluten peptide
PQPFPPQLPYPQPPPFSPQQ

SEQ ID NO: 499 - protein, 20 aa, Artificial Sequence
  gluten peptide
PQPFPPQLPYPQPQSFPPQQ

SEQ ID NO: 500 - protein, 16 aa, Artificial Sequence
  gluten peptide
GQPQPFPPELPYPQPG

SEQ ID NO: 501 - protein, 16 aa, Artificial Sequence
  gluten peptide
GQPQPFPPQLPYPQPG

SEQ ID NO: 502 - protein, 20 aa, Artificial Sequence
  gluten peptide
PFPQPQPFPPQLPYPQPPPF

SEQ ID NO: 503 - protein, 15 aa, Artificial Sequence
  gluten peptide
GSGPPELPYPQPGSG

SEQ ID NO: 504 - protein, 20 aa, Artificial Sequence
  gluten peptide
PFPQPQPFPPQLPYPQPQSF

SEQ ID NO: 505 - protein, 20 aa, Artificial Sequence
  gluten peptide
PQPFPPQLPYPQPPPFSPQQ

SEQ ID NO: 506 - protein, 20 aa, Artificial Sequence
  gluten peptide
PYMQLQPFPQPQLPYPQPQL

SEQ ID NO: 507 - protein, 20 aa, Artificial Sequence
  gluten peptide
MQLQPFPQPQLPYPQPQLPY

SEQ ID NO: 508 - protein, 20 aa, Artificial Sequence
  gluten peptide
MQLQPFPQPQPFPPQLPYPQ

SEQ ID NO: 509 - protein, 20 aa, Artificial Sequence
  gluten peptide
PFPSQQPYMQLQPFPQPQPF

SEQ ID NO: 510 - protein, 20 aa, Artificial Sequence
  gluten peptide
PFPSQQPYMQLQPFPQPQLP

SEQ ID NO: 511 - protein, 20 aa, Artificial Sequence
  gluten peptide
PFPSQQPYMQLQPFPQPQPF

SEQ ID NO: 512 - protein, 20 aa, Artificial Sequence
  gluten peptide
PQRLARSQMWQQSSCHVMQQ

SEQ ID NO: 513 - protein, 20 aa, Artificial Sequence
  gluten peptide
QGLARSQMLQQSSCHVMQQQ

SEQ ID NO: 514 - protein, 20 aa, Artificial Sequence
  gluten peptide
PQRLARSQMWQQSSCHVMQQ

SEQ ID NO: 515 - protein, 20 aa, Artificial Sequence
  gluten peptide
RLARSQMLQQSSCHVMQQQC

SEQ ID NO: 516 - protein, 20 aa, Artificial Sequence
  gluten peptide
RPQMWQQSSCHVMQQQCCQQ

SEQ ID NO: 517 - protein, 20 aa, Artificial Sequence
  gluten peptide
MWQQSSCHVMQQQCCQQLQQ

SEQ ID NO: 518 - protein, 20 aa, Artificial Sequence
  gluten peptide
SQMLQQSSCHVMQQQCCQQL

SEQ ID NO: 519 - protein, 20 aa, Artificial Sequence
  gluten peptide
QQSSCHVMQQQCCQQLQQIP

SEQ ID NO: 520 - protein, 20 aa, Artificial Sequence
  gluten peptide
QQSSCHVMQQQCCQQLQQIP

SEQ ID NO: 521 - protein, 20 aa, Artificial Sequence
  gluten peptide
RLARSQMWQQSSCHVMQQQC

SEQ ID NO: 522 - protein, 20 aa, Artificial Sequence
  gluten peptide
ARSQMLQQSSCHVMQQQCCQ

SEQ ID NO: 523 - protein, 16 aa, Artificial Sequence
  gluten peptide
GQQQFSQPEQEFPQPG

SEQ ID NO: 524 - protein, 16 aa, Artificial Sequence
  gluten peptide
GQQQFSQPQQQFPQPG

SEQ ID NO: 525 - protein, 16 aa, Artificial Sequence
  gluten peptide
GQQQFSQPEQQFPQPG

SEQ ID NO: 526 - protein, 20 aa, Artificial Sequence
  gluten peptide
SQQPQQQFSQPQQQFPQPQQ

SEQ ID NO: 527 - protein, 20 aa, Artificial Sequence
  gluten peptide
SQQPQQQFSQPQQQFPQPQQ

SEQ ID NO: 528 - protein, 15 aa, Artificial Sequence
  gluten peptide
QQFSQPEQEFPQPQQ

SEQ ID NO: 529 - protein, 20 aa, Artificial Sequence
  gluten peptide
QSQQPQQQFSQPQQQFPQPQ

SEQ ID NO: 530 - protein, 20 aa, Artificial Sequence
  gluten peptide
QPQQQFSQPQQQFPQPQQPQ

SEQ ID NO: 531 - protein, 16 aa, Artificial Sequence
  gluten peptide
GFFPQPEQEFPQPQQG

SEQ ID NO: 532 - protein, 20 aa, Artificial Sequence
  gluten peptide
SQQPQQPFPQPQQQFPQPQQ

SEQ ID NO: 533 - protein, 20 aa, Artificial Sequence
  gluten peptide
SQQPQQPFPQPQQQFPQPQQ

SEQ ID NO: 534 - protein, 20 aa, Artificial Sequence
  gluten peptide
PQQPFPQQPQQQFPQPQQPQ

SEQ ID NO: 535 - protein, 20 aa, Artificial Sequence
  gluten peptide
PQQQFPQPQQPQQPFPQQPQ

SEQ ID NO: 536 - protein, 20 aa, Artificial Sequence
  gluten peptide
QPFPQPQQQFPQPQQPQQSF

SEQ ID NO: 537 - protein, 20 aa, Artificial Sequence
  gluten peptide
QQPQQPFPQQPQQQFPQPQQ

SEQ ID NO: 538 - protein, 16 aa, Artificial Sequence
  gluten peptide
GFFPQPQQEFPQPQQG

SEQ ID NO: 539 - protein, 20 aa, Artificial Sequence
  gluten peptide
SQQPQQPFPQPQQQFPQPQQ

SEQ ID NO: 540 - protein, 16 aa, Artificial Sequence
  gluten peptide
GFFPQPQQQFPQPQQG

SEQ ID NO: 541 - protein, 20 aa, Artificial Sequence
  gluten peptide
QQPQQQFPQPQQPQQPFPQP

SEQ ID NO: 542 - protein, 16 aa, Artificial Sequence
  gluten peptide
GFPQQPEQEFPQPQQG

SEQ ID NO: 543 - protein, 20 aa, Artificial Sequence
  gluten peptide
PQQPFPQQPQQQFPQPQQPQ

SEQ ID NO: 544 - protein, 16 aa, Artificial Sequence
  gluten peptide
GFFSQPQQEFPQPQQG

SEQ ID NO: 545 - protein, 20 aa, Artificial Sequence
  gluten peptide
PQPQQQFPQPQQPQQSFPQQ

SEQ ID NO: 546 - protein, 16 aa, Artificial Sequence
  gluten peptide
GFPQQPQQEFPQPQQG

SEQ ID NO: 547 - protein, 20 aa, Artificial Sequence
  gluten peptide
SQQPQQQFSQPQQQFPQPQQ

SEQ ID NO: 548 - protein, 20 aa, Artificial Sequence
  gluten peptide
SQQPQQQFSQPQQQFPQPQQ

SEQ ID NO: 549 - protein, 15 aa, Artificial Sequence
  gluten peptide
QQFSQPEQEFPQPQQ

SEQ ID NO: 550 - protein, 20 aa, Artificial Sequence
  gluten peptide
QSQQPQQQFSQPQQQFPQPQ

SEQ ID NO: 551 - protein, 20 aa, Artificial Sequence
  gluten peptide
PQQQFPQPQQPQQPFPQQPQ

SEQ ID NO: 552 - protein, 20 aa, Artificial Sequence
  gluten peptide
QPQQQFSQPQQQFPQPQQPQ

SEQ ID NO: 553 - protein, 20 aa, Artificial Sequence
  gluten peptide
QQPQQPFPQQPQQQFPQPQQ

SEQ ID NO: 554 - protein, 20 aa, Artificial Sequence
  gluten peptide
PQQPQQPFPQQPQQQFPQPQ

SEQ ID NO: 555 - protein, 16 aa, Artificial Sequence
  gluten peptide
GFFSQPQQQFPQPQQG

SEQ ID NO: 556 - protein, 20 aa, Artificial Sequence
  gluten peptide
TFPHQPQQQFPQPQQPQQPF

SEQ ID NO: 557 - protein, 20 aa, Artificial Sequence
  gluten peptide
QTFPHQPQQQFPQPQQPQQQ

SEQ ID NO: 558 - protein, 16 aa, Artificial Sequence
  gluten peptide
GFPQQPQQQFPQPQQG

SEQ ID NO: 559 - protein, 20 aa, Artificial Sequence
  gluten peptide
SQPQQQFPQPQQPQQSFPQQ

SEQ ID NO: 560 - protein, 20 aa, Artificial Sequence
  gluten peptide
QTCPHQPQQQFPQPQQPQQP

SEQ ID NO: 561 - protein, 20 aa, Artificial Sequence
  gluten peptide
PVPQLQPKNPSQQQPQEQVP

SEQ ID NO: 562 - protein, 20 aa, Artificial Sequence
  gluten peptide
AVRVPVPQLQPKNPSQQQPQ

SEQ ID NO: 563 - protein, 20 aa, Artificial Sequence
  gluten peptide
METSCISGLERPWQQQPLPP

SEQ ID NO: 564 - protein, 20 aa, Artificial Sequence
  gluten peptide
PWQQQPLPPQQSFSQQPPFS

SEQ ID NO: 565 - protein, 20 aa, Artificial Sequence
  gluten peptide
PWQQQPLPPQQSFSQQPPFS

SEQ ID NO: 566 - protein, 20 aa, Artificial Sequence
  gluten peptide
ERPWQEQPLPPQHTLFPQQQ

SEQ ID NO: 567 - protein, 20 aa, Artificial Sequence
  gluten peptide
ETRCIPGLERPWQQQPLPPQ

SEQ ID NO: 568 - protein, 20 aa, Artificial Sequence
  gluten peptide
SHIPGLERPWQQQPLPPQQT

SEQ ID NO: 569 - protein, 20 aa, Artificial Sequence
  gluten peptide
MRCIPGLERPWQQQPLPPQQ

SEQ ID NO: 570 - protein, 20 aa, Artificial Sequence
  gluten peptide
SCISGLERPWQQQPLPPQQS

SEQ ID NO: 571 - protein, 20 aa, Artificial Sequence
  gluten peptide
PWQQQPLPPQQTLFPQQQPF

SEQ ID NO: 572 - protein, 20 aa, Artificial Sequence
  gluten peptide
ERPWQQQPLPPQQSFSQQPP

SEQ ID NO: 573 - protein, 20 aa, Artificial Sequence
  gluten peptide
SCISGLERPWQQQPLPPQQS

SEQ ID NO: 574 - protein, 20 aa, Artificial Sequence
  gluten peptide
RPWQQQPLPPQQTFPQQPPF

SEQ ID NO: 575 - protein, 20 aa, Artificial Sequence
  gluten peptide
PWQEQPLPPQHTLFPQQQPF

SEQ ID NO: 576 - protein, 20 aa, Artificial Sequence
  gluten peptide
EKPWQQQPLPPQQQPPCSQQ

SEQ ID NO: 577 - protein, 20 aa, Artificial Sequence
  gluten peptide
PWQQQPLPPQQSFSQQPPFS

SEQ ID NO: 578 - protein, 20 aa, Artificial Sequence
  gluten peptide
ETSCIPGLERPWQEQPLPPQ

SEQ ID NO: 579 - protein, 20 aa, Artificial Sequence
  gluten peptide
SQQPPFSQQQQQPLPQQPSF

SEQ ID NO: 580 - protein, 20 aa, Artificial Sequence
  gluten peptide
QPLPQQPSFSQQQPPFSQQQ

SEQ ID NO: 581 - protein, 20 aa, Artificial Sequence
  gluten peptide
QQQQQPLPQQPSFSQQQPPF

SEQ ID NO: 582 - protein, 20 aa, Artificial Sequence
  gluten peptide
PPFSQQQQQPLPQQPSFSQQ

SEQ ID NO: 583 - protein, 20 aa, Artificial Sequence
  gluten peptide
QPLPQQPSFSQQQPPFSQQQ

SEQ ID NO: 584 - protein, 20 aa, Artificial Sequence
  gluten peptide
SQQPPFSQQQQQPLPQQPSF

SEQ ID NO: 585 - protein, 16 aa, Artificial Sequence
  gluten peptide
GQQQQPLPEQPSFSPG

SEQ ID NO: 586 - protein, 20 aa, Artificial Sequence
  gluten peptide
QQQQQPLPQQPSFSQQQPPF

SEQ ID NO: 587 - protein, 16 aa, Artificial Sequence
  gluten peptide
GQQQQPLPQQPSFSPG

SEQ ID NO: 588 - protein, 20 aa, Artificial Sequence
  gluten peptide
QQSRYEAIRAIVYSTILQEQ

SEQ ID NO: 589 - protein, 20 aa, Artificial Sequence
  gluten peptide
AIVYSTILQEQQQVQGSIQT

SEQ ID NO: 590 - protein, 20 aa, Artificial Sequence
  gluten peptide
QQQPILSQQPPFSQQQQPVL

SEQ ID NO: 591 - protein, 20 aa, Artificial Sequence
  gluten peptide
FSQQQPPFSQQQPILSQQPP

SEQ ID NO: 592 - protein, 20 aa, Artificial Sequence
  gluten peptide
FSQQQPPFSQQQPILSQQPP

SEQ ID NO: 593 - protein, 20 aa, Artificial Sequence
  gluten peptide
QQQPILSQQPPFSQQQQPVL

SEQ ID NO: 594 - protein, 20 aa, Artificial Sequence
  gluten peptide
QQQPPFSQQQPILSQQPPFS

SEQ ID NO: 595 - protein, 20 aa, Artificial Sequence
  gluten peptide
SQQQPILSQQPPFSQQQQPV

SEQ ID NO: 596 - protein, 20 aa, Artificial Sequence
  gluten peptide
QQQPPFSQQQPILSQQPPFS

SEQ ID NO: 597 - protein, 20 aa, Artificial Sequence
  gluten peptide
VMQQEQQQGIQILRPLFQLV

SEQ ID NO: 598 - protein, 20 aa, Artificial Sequence
  gluten peptide
QEQQQGIQILRPLFQLVQGQ

SEQ ID NO: 599 - protein, 20 aa, Artificial Sequence
  gluten peptide
CSIIKAPFSSVVAGIGGQYR

SEQ ID NO: 600 - protein, 18 aa, Artificial Sequence
  gluten peptide
CSIIKAPFSSVVAGIGGQ

SEQ ID NO: 601 - protein, 19 aa, Artificial Sequence
  gluten peptide
YIPPYCSTTIAPVGIFGTN

SEQ ID NO: 602 - protein, 20 aa, Artificial Sequence
  gluten peptide
VYIPPYCSTTIAPVGIFGTN

SEQ ID NO: 603 - protein, 20 aa, Artificial Sequence
  gluten peptide
QQCSHVAMSQRLARSQMWQQ

SEQ ID NO: 604 - protein, 20 aa, Artificial Sequence
  gluten peptide
KVFLQQQCSHVAMSQRLARP

SEQ ID NO: 605 - protein, 20 aa, Artificial Sequence
  gluten peptide
QCSHVAMSQRLARPQMWQQS

SEQ ID NO: 606 - protein, 20 aa, Artificial Sequence
  gluten peptide
FLPQLPYPQPQSFPPQQPYP

SEQ ID NO: 607 - protein, 20 aa, Artificial Sequence
  gluten peptide
PQPFLPQLPYPQPQSFPPQQ

SEQ ID NO: 608 - protein, 20 aa, Artificial Sequence
  gluten peptide
PQPFLPQLPYPQPQSFPPQQ

SEQ ID NO: 609 - protein, 20 aa, Artificial Sequence
  gluten peptide
PQPFPPQLPYPQPQSFPPQQ

SEQ ID NO: 610 - protein, 16 aa, Artificial Sequence
  gluten peptide
GQPQSFPPEQPYPQQG

SEQ ID NO: 611 - protein, 20 aa, Artificial Sequence
  gluten peptide
LPQLPYPQPQSFPPQQPYPQ

SEQ ID NO: 612 - protein, 16 aa, Artificial Sequence
  gluten peptide
GQPQSFPPQQPYPQQG

SEQ ID NO: 613 - protein, 20 aa, Artificial Sequence
  gluten peptide
RYDAICAITYSIILQEQQQG

SEQ ID NO: 614 - protein, 20 aa, Artificial Sequence
  gluten peptide
AIRAIIYSIILQEQQQGFVQ

SEQ ID NO: 615 - protein, 20 aa, Artificial Sequence
  gluten peptide
IRAIVYSIILQEQQQGFVQP

SEQ ID NO: 616 - protein, 20 aa, Artificial Sequence
  gluten peptide
IIYSIILQEQQQGQGSVESQ

SEQ ID NO: 617 - protein, 20 aa, Artificial Sequence
  gluten peptide
AIRAIIYSIILQEQQQVQGS

SEQ ID NO: 618 - protein, 20 aa, Artificial Sequence
  gluten peptide
AIIYSIILQEQQQGFVQPQQ

SEQ ID NO: 619 - protein, 20 aa, Artificial Sequence
  gluten peptide
RYEAIRAIVYSIILQEQQQV

SEQ ID NO: 620 - protein, 20 aa, Artificial Sequence
  gluten peptide
IRAITYSIILQEQQQGFVQA

SEQ ID NO: 621 - protein, 20 aa, Artificial Sequence
  gluten peptide
VYSIILQQQQQQQQQQQGQS

SEQ ID NO: 622 - protein, 20 aa, Artificial Sequence
  gluten peptide
AIIYSIILQEQQQVQGSIQS

SEQ ID NO: 623 - protein, 20 aa, Artificial Sequence
  gluten peptide
SIRAIVYSIILQQQQQQQQQ

SEQ ID NO: 624 - protein, 20 aa, Artificial Sequence
  gluten peptide
AIIYSIILQEQQQVQGSIQS

SEQ ID NO: 625 - protein, 20 aa, Artificial Sequence
  gluten peptide
AIIFSIILQEQQQGFVQPQQ

SEQ ID NO: 626 - protein, 20 aa, Artificial Sequence
  gluten peptide
SIILQEQQQGQGSVESQEQQ

SEQ ID NO: 627 - protein, 20 aa, Artificial Sequence
  gluten peptide
RHESIRAIIYSIILQQQQQQ

SEQ ID NO: 628 - protein, 20 aa, Artificial Sequence
  gluten peptide
YSIILQEQQQGFVQPQQQQP

SEQ ID NO: 629 - protein, 20 aa, Artificial Sequence
  gluten peptide
AIRAIIYSIILQEQQQVQGS

SEQ ID NO: 630 - protein, 20 aa, Artificial Sequence
  gluten peptide
YEAIRAIIYSIILQEQQQGF

SEQ ID NO: 631 - protein, 20 aa, Artificial Sequence
  gluten peptide
HQPQQQFPQTQQPQQPFPQP

SEQ ID NO: 632 - protein, 20 aa, Artificial Sequence
  gluten peptide
PQTQQPQQPFPQPQQTFPQQ

SEQ ID NO: 633 - protein, 20 aa, Artificial Sequence
  gluten peptide
QQPFPQTQQPQQPFPQQPQQ

SEQ ID NO: 634 - protein, 20 aa, Artificial Sequence
  gluten peptide
QTQQPQQPFPQQPQQPFPQT

SEQ ID NO: 635 - protein, 20 aa, Artificial Sequence
  gluten peptide
QPQQPFPQSQQPQQPFPQPQ

SEQ ID NO: 636 - protein, 16 aa, Artificial Sequence
  gluten peptide
GFPQTQQPEQPFPQQG

SEQ ID NO: 637 - protein, 16 aa, Artificial Sequence
  gluten peptide
GFPQSQQPEQPFPQQG

SEQ ID NO: 638 - protein, 20 aa, Artificial Sequence
  gluten peptide
PQQPQQPFPQTQQPQQPFPQ

SEQ ID NO: 639 - protein, 20 aa, Artificial Sequence
  gluten peptide
QQPFPQTQQPQQPFPQLQQP

SEQ ID NO: 640 - protein, 20 aa, Artificial Sequence
  gluten peptide
QPQQPFPQSQQPQQPFPQPQ

SEQ ID NO: 641 - protein, 20 aa, Artificial Sequence
  gluten peptide
QPQQPFPQTQQPQQPFPQQP

SEQ ID NO: 642 - protein, 20 aa, Artificial Sequence
  gluten peptide
PQTQQPQQPFPQSQQPQQPF

SEQ ID NO: 643 - protein, 20 aa, Artificial Sequence
  gluten peptide
QQFPQTQQPQQPFPQPQQTF

SEQ ID NO: 644 - protein, 16 aa, Artificial Sequence
  gluten peptide
GQQPFPQSQQPQQPFG

SEQ ID NO: 645 - protein, 20 aa, Artificial Sequence
  gluten peptide
QQPFPQTQQPQQPFPQQPQQ

SEQ ID NO: 646 - protein, 16 aa, Artificial Sequence
  gluten peptide
GFPQSQQPQQPFPQQG

SEQ ID NO: 647 - protein, 20 aa, Artificial Sequence
  gluten peptide
QQPFPQTQQPQQPFPQSKQP

SEQ ID NO: 648 - protein, 20 aa, Artificial Sequence
  gluten peptide
QQPFPQTQQPQQPFPQSQQP

SEQ ID NO: 649 - protein, 16 aa, Artificial Sequence
  gluten peptide
GFPQTQQPQQPFPQQG

SEQ ID NO: 650 - protein, 16 aa, Artificial Sequence
  gluten peptide
GQQPFPQSEQPQQPFG

SEQ ID NO: 651 - protein, 16 aa, Artificial Sequence
  gluten peptide
GQQPFPQTQQPQQPFG

SEQ ID NO: 652 - protein, 16 aa, Artificial Sequence
  gluten peptide
GQQPFPQTEQPQQPFG

SEQ ID NO: 653 - protein, 20 aa, Artificial Sequence
  gluten peptide
PFPQTQQPQQPFPQLQQPQQ

SEQ ID NO: 654 - protein, 20 aa, Artificial Sequence
  gluten peptide
QPFPQLQQPQQPLPQPQQPQ

SEQ ID NO: 655 - protein, 16 aa, Artificial Sequence
  gluten peptide
GFPQLQQPEQPLPQQG

SEQ ID NO: 656 - protein, 20 aa, Artificial Sequence
  gluten peptide
QPQQPFPQLQQPQQPLPQPQ

SEQ ID NO: 657 - protein, 16 aa, Artificial Sequence
  gluten peptide
GFPQLQQPQQPLPQQG

SEQ ID NO: 658 - protein, 16 aa, Artificial Sequence
  gluten peptide
GQPIPQQPEQPFPLQG

SEQ ID NO: 659 - protein, 20 aa, Artificial Sequence
  gluten peptide
FPELQQPIPQQPQQPFPLQP

SEQ ID NO: 660 - protein, 20 aa, Artificial Sequence
  gluten peptide
FPELQQPIPQQPQQPFPLQP

SEQ ID NO: 661 - protein, 16 aa, Artificial Sequence
  gluten peptide
GQPIPQQPQQPFPLQG

SEQ ID NO: 662 - protein, 16 aa, Artificial Sequence
  gluten peptide
GQLQQPIPQQPQQPFG

SEQ ID NO: 663 - protein, 16 aa, Artificial Sequence
  gluten peptide
GQLQQPIPEQPQQPFG

SEQ ID NO: 664 - protein, 20 aa, Artificial Sequence
  gluten peptide
QQPFPQQPQQPFPQPQQPIP

SEQ ID NO: 665 - protein, 20 aa, Artificial Sequence
  gluten peptide
FPQQPQQPFPQPQLPFPQQS

SEQ ID NO: 666 - protein, 20 aa, Artificial Sequence
  gluten peptide
QQFLQPQQPFPQQPQQPYPQ

SEQ ID NO: 667 - protein, 20 aa, Artificial Sequence
  gluten peptide
PLQPQQPFPQQPQQPFPQPQ

SEQ ID NO: 668 - protein, 20 aa, Artificial Sequence
  gluten peptide
QLPFPQQPQQPFPQPQQPQQ

SEQ ID NO: 669 - protein, 20 aa, Artificial Sequence
  gluten peptide
TQQPQQPFPQQPQQPFPQTQ

SEQ ID NO: 670 - protein, 20 aa, Artificial Sequence
  gluten peptide
QTQQPQQPFPQQPQQPFPQT

SEQ ID NO: 671 - protein, 20 aa, Artificial Sequence
  gluten peptide
PQPQQPQLPFPQQPQQPFPQ

SEQ ID NO: 672 - protein, 20 aa, Artificial Sequence
  gluten peptide
QQPFPQQPQQPFPQTQQPQQ

SEQ ID NO: 673 - protein, 20 aa, Artificial Sequence
  gluten peptide
QQPYPQQPQQPFPQTQQPQQ

SEQ ID NO: 674 - protein, 16 aa, Artificial Sequence
  gluten peptide
GQPFPQQPEQPFPQQG

SEQ ID NO: 675 - protein, 20 aa, Artificial Sequence
  gluten peptide
FPLQPQQPFPQQPQQPFPQP

SEQ ID NO: 676 - protein, 20 aa, Artificial Sequence
  gluten peptide
PQQPFLQPQQPFPQQPQQPF

SEQ ID NO: 677 - protein, 20 aa, Artificial Sequence
  gluten peptide
PLQPQQPFPQQPQQPFPQQP

SEQ ID NO: 678 - protein, 16 aa, Artificial Sequence
  gluten peptide
GQPQQPFPEQPQQPFG

SEQ ID NO: 679 - protein, 16 aa, Artificial Sequence
  gluten peptide
GQPYPQQPEQPFPQQG

SEQ ID NO: 680 - protein, 16 aa, Artificial Sequence
  gluten peptide
GQPFPQQPQQPFPQQG

SEQ ID NO: 681 - protein, 20 aa, Artificial Sequence
  gluten peptide
YPQQPFPQQPQQPFPQQPPF

SEQ ID NO: 682 - protein, 20 aa, Artificial Sequence
  gluten peptide
QQTFPQQPQLPFPQQPQQPF

SEQ ID NO: 683 - protein, 20 aa, Artificial Sequence
  gluten peptide
PQQQFLQPQQPFPQQPQQPY

SEQ ID NO: 684 - protein, 20 aa, Artificial Sequence
  gluten peptide
PLQPQQPFPQQPQQPFPQPQ

SEQ ID NO: 685 - protein, 16 aa, Artificial Sequence
  gluten peptide
GQPQQPFPQQPQQPFG

SEQ ID NO: 686 - protein, 20 aa, Artificial Sequence
  gluten peptide
RQPFPQQPQQPYPQQPQQPF

SEQ ID NO: 687 - protein, 16 aa, Artificial Sequence
  gluten peptide
GQPYPQQPQQPFPQQG

SEQ ID NO: 688 - protein, 20 aa, Artificial Sequence
  gluten peptide
QQPFPQQPQQPYPQQPQQPF

SEQ ID NO: 689 - protein, 20 aa, Artificial Sequence
  gluten peptide
QPQQPFPQQPQQPFPQTQQP

SEQ ID NO: 690 - protein, 20 aa, Artificial Sequence
  gluten peptide
FPQQPQQPYPQQPQQPFPQT

SEQ ID NO: 691 - protein, 20 aa, Artificial Sequence
  gluten peptide
FPQQPRQPYPQQPQQPFPQT

SEQ ID NO: 692 - protein, 15 aa, Artificial Sequence
  gluten peptide
PFPEQPEQPYPQQPQ

SEQ ID NO: 693 - protein, 20 aa, Artificial Sequence
  gluten peptide
PFPQQPQQPFPQQPQQSFPQ

SEQ ID NO: 694 - protein, 16 aa, Artificial Sequence
  gluten peptide
GQPQLPFPEQPQQPFG

SEQ ID NO: 695 - protein, 16 aa, Artificial Sequence
  gluten peptide
GQPQLPFPQQPQQPFG

SEQ ID NO: 696 - protein, 20 aa, Artificial Sequence
  gluten peptide
PQQPQQSFPQQPQQPYPQQQ

SEQ ID NO: 697 - protein, 20 aa, Artificial Sequence
  gluten peptide
QQPQQSFPQQPQQPYPQQQP

SEQ ID NO: 698 - protein, 20 aa, Artificial Sequence
  gluten peptide
LQPQQPFPQQPQQPYPQQPQ

SEQ ID NO: 699 - protein, 20 aa, Artificial Sequence
  gluten peptide
PQQQFLQPRQPFPQQPQQPY

SEQ ID NO: 700 - protein, 20 aa, Artificial Sequence
  gluten peptide
PRQPFPQQPQQPYPQQPQQP

SEQ ID NO: 701 - protein, 16 aa, Artificial Sequence
  gluten peptide
GQPTPIQPEQPFPQQG

SEQ ID NO: 702 - protein, 20 aa, Artificial Sequence
  gluten peptide
FTQPQQPTPIQPQQPFPQQP

SEQ ID NO: 703 - protein, 20 aa, Artificial Sequence
  gluten peptide
PFTQPQQPTPIQPQQPFPQQ

SEQ ID NO: 704 - protein, 20 aa, Artificial Sequence
  gluten peptide
TPIQPQQPFPQQPQQPQQPF

SEQ ID NO: 705 - protein, 16 aa, Artificial Sequence
  gluten peptide
GQPTPIQPQQPFPQQG

SEQ ID NO: 706 - protein, 16 aa, Artificial Sequence
  gluten peptide
GQPFSQQPEQIFPQQG

SEQ ID NO: 707 - protein, 20 aa, Artificial Sequence
  gluten peptide
QQPFSQQPQQIFPQPQQTFP

SEQ ID NO: 708 - protein, 20 aa, Artificial Sequence
  gluten peptide
QQQQPFPQPQQPFSQQPQQI

SEQ ID NO: 709 - protein, 20 aa, Artificial Sequence
  gluten peptide
HQPFSQQPQQIFPQPQQTFP

SEQ ID NO: 710 - protein, 16 aa, Artificial Sequence
  gluten peptide
GQPFSQQPQQIFPQQG

SEQ ID NO: 711 - protein, 20 aa, Artificial Sequence
  gluten peptide
PFLQPHQPFSQQPQQIFPQP

SEQ ID NO: 712 - protein, 16 aa, Artificial Sequence
  gluten peptide
GQPQQPFSEQPQQIFG

SEQ ID NO: 713 - protein, 20 aa, Artificial Sequence
  gluten peptide
QQQPFLQPHQPFSQQPQQIF

SEQ ID NO: 714 - protein, 20 aa, Artificial Sequence
  gluten peptide
QPQQPFSQQPQQIFPQPQQT

SEQ ID NO: 715 - protein, 16 aa, Artificial Sequence
  gluten peptide
GQPQQPFSQQPQQIFG

SEQ ID NO: 716 - protein, 16 aa, Artificial Sequence
  gluten peptide
GQQIFPQPEQTFPHQG

SEQ ID NO: 717 - protein, 16 aa, Artificial Sequence
  gluten peptide
GQQIFPQPQQTFPHQG

SEQ ID NO: 718 - protein, 20 aa, Artificial Sequence
  gluten peptide
PQQPQQPQQPFPQPQQPFPW

SEQ ID NO: 719 - protein, 20 aa, Artificial Sequence
  gluten peptide
PQQPQQPQQPFPQPQQPFPW

SEQ ID NO: 720 - protein, 20 aa, Artificial Sequence
  gluten peptide
PQQPFPQPQQPQQPFPQPQQ

SEQ ID NO: 721 - protein, 20 aa, Artificial Sequence
  gluten peptide
PQQQFPQPQQPQQPFPQQPQ

SEQ ID NO: 722 - protein, 20 aa, Artificial Sequence
  gluten peptide
QPQQPQQPFPQPQQPQLPFP

SEQ ID NO: 723 - protein, 20 aa, Artificial Sequence
  gluten peptide
PQQPFPQQPQQPQQPFPQPQ

SEQ ID NO: 724 - protein, 20 aa, Artificial Sequence
  gluten peptide
QQQQPFPQPQQPQQPFPQPQ

SEQ ID NO: 725 - protein, 20 aa, Artificial Sequence
  gluten peptide
TPIQPQQPFPQQPQQPQQPF

SEQ ID NO: 726 - protein, 20 aa, Artificial Sequence
  gluten peptide
PIQPQQPFPQQPQQPQQPFP

SEQ ID NO: 727 - protein, 20 aa, Artificial Sequence
  gluten peptide
QQFPQPQQPQQPFPQQPQQQ

SEQ ID NO: 728 - protein, 16 aa, Artificial Sequence
  gluten peptide
GQQPFPQPEQPQQPFG

SEQ ID NO: 729 - protein, 20 aa, Artificial Sequence
  gluten peptide
QQPQQQFPQPQQPQQPFPQP

SEQ ID NO: 730 - protein, 20 aa, Artificial Sequence
  gluten peptide
LQQPQQPLPQPQQPQQPFPQ

SEQ ID NO: 731 - protein, 16 aa, Artificial Sequence
  gluten peptide
GFPQPQQPEQPFPQQG

SEQ ID NO: 732 - protein, 16 aa, Artificial Sequence
  gluten peptide
GFPQPQQPQQPFPQQG

SEQ ID NO: 733 - protein, 20 aa, Artificial Sequence
  gluten peptide
QQPFPQPQQPQQPFPQLQQP

SEQ ID NO: 734 - protein, 20 aa, Artificial Sequence
  gluten peptide
PQQQFPQPQQPQQPFPQQPQ

SEQ ID NO: 735 - protein, 20 aa, Artificial Sequence
  gluten peptide
QPQQPQQPFPQQQQPLIQPY

SEQ ID NO: 736 - protein, 20 aa, Artificial Sequence
  gluten peptide
PQQPFPQPQQPQQPFPQLQQ

SEQ ID NO: 737 - protein, 16 aa, Artificial Sequence
  gluten peptide
GQQPFPQPQQPQQPFG

SEQ ID NO: 738 - protein, 16 aa, Artificial Sequence
  gluten peptide
GQQPLPQPEQPQQPFG

SEQ ID NO: 739 - protein, 20 aa, Artificial Sequence
  gluten peptide
PQPQQPQQPFPQQQQPLIQP

SEQ ID NO: 740 - protein, 20 aa, Artificial Sequence
  gluten peptide
QQPFPQPQQPQQPFPQSQQP

SEQ ID NO: 741 - protein, 20 aa, Artificial Sequence
  gluten peptide
TFPHQPQQQVPQPQQPQQPF

SEQ ID NO: 742 - protein, 16 aa, Artificial Sequence
  gluten peptide
GQQQFPQPQQPQQPFG

SEQ ID NO: 743 - protein, 16 aa, Artificial Sequence
  gluten peptide
GQQPLPQPQQPQQPFG

SEQ ID NO: 744 - protein, 20 aa, Artificial Sequence
  gluten peptide
TFPHQPQQQFPQPQQPQQPF

SEQ ID NO: 745 - protein, 20 aa, Artificial Sequence
  gluten peptide
QQPLPQPQQPQQPFPQSQQP

SEQ ID NO: 746 - protein, 16 aa, Artificial Sequence
  gluten peptide
GQQQFPQPEQPQQPFG

SEQ ID NO: 747 - protein, 20 aa, Artificial Sequence
  gluten peptide
QQVPQPQQPQQPFLQPQQPF

SEQ ID NO: 748 - protein, 20 aa, Artificial Sequence
  gluten peptide
QQPLPQPQQPQQPFPQSQQP

SEQ ID NO: 749 - protein, 20 aa, Artificial Sequence
  gluten peptide
QQVPQPQQPQQPFLQPQQPF

SEQ ID NO: 750 - protein, 20 aa, Artificial Sequence
  gluten peptide
PQQAQLPFPQQPQQPLPQPQ

SEQ ID NO: 751 - protein, 20 aa, Artificial Sequence
  gluten peptide
QAQLPFPQQPQQPLPQPQQP

SEQ ID NO: 752 - protein, 20 aa, Artificial Sequence
  gluten peptide
QQPFPQQPQQPSSQQPPFPQ

SEQ ID NO: 753 - protein, 20 aa, Artificial Sequence
  gluten peptide
QQQQPSSQQPPFPQQHQQFP

SEQ ID NO: 754 - protein, 20 aa, Artificial Sequence
  gluten peptide
PPFSQQQQPSSQQPPFPQQH

SEQ ID NO: 755 - protein, 20 aa, Artificial Sequence
  gluten peptide
PQQPFPQPQQTFPQQPQLPF

SEQ ID NO: 756 - protein, 20 aa, Artificial Sequence
  gluten peptide
FPQPQQTFPQQPQLPFPQQP

SEQ ID NO: 757 - protein, 20 aa, Artificial Sequence
  gluten peptide
QQTFPQQPQLPFPQQPQQPF

SEQ ID NO: 758 - protein, 20 aa, Artificial Sequence
  gluten peptide
PQQPFPQPQQTFPQQPQLPF

SEQ ID NO: 759 - protein, 20 aa, Artificial Sequence
  gluten peptide
QPFPQPQQPFPWQPQQPFPQ

SEQ ID NO: 760 - protein, 20 aa, Artificial Sequence
  gluten peptide
QPFPQPQQPFPWQPQQPFPQ

SEQ ID NO: 761 - protein, 20 aa, Artificial Sequence
  gluten peptide
QPFPQPQQPFPWQPQQPFPQ

SEQ ID NO: 762 - protein, 16 aa, Artificial Sequence
  gluten peptide
GQPFPWQPQQPFPQQG

SEQ ID NO: 763 - protein, 20 aa, Artificial Sequence
  gluten peptide
PFPWQPQQPFPQTQQSFPLQ

SEQ ID NO: 764 - protein, 16 aa, Artificial Sequence
  gluten peptide
GQPFPWQPEQPFPQQG

SEQ ID NO: 765 - protein, 16 aa, Artificial Sequence
  gluten peptide
GQQIFPQPEQTFPHQG

SEQ ID NO: 766 - protein, 16 aa, Artificial Sequence
  gluten peptide
GQQAFPQPEQTFPHQG

SEQ ID NO: 767 - protein, 16 aa, Artificial Sequence
  gluten peptide
GQQIFPQPQQTFPHQG

SEQ ID NO: 768 - protein, 16 aa, Artificial Sequence
  gluten peptide
GQQTFPQPEQTFPHQG

SEQ ID NO: 769 - protein, 16 aa, Artificial Sequence
  gluten peptide
GQQAFPQPQQTFPHQG

SEQ ID NO: 770 - protein, 16 aa, Artificial Sequence
  gluten peptide
GQQTFPQPQQTFPHQG

SEQ ID NO: 771 - protein, 20 aa, Artificial Sequence
  gluten peptide
QQIFPQPQQTFPHQPQQAFP

SEQ ID NO: 772 - protein, 16 aa, Artificial Sequence
  gluten peptide
GQTFPHQPEQAFPQPG

SEQ ID NO: 773 - protein, 20 aa, Artificial Sequence
  gluten peptide
QTFPHQPQQAFPQPQQTFPH

SEQ ID NO: 774 - protein, 16 aa, Artificial Sequence
  gluten peptide
GQTFPHQPQQAFPQPG

SEQ ID NO: 775 - protein, 20 aa, Artificial Sequence
  gluten peptide
PQQTFPHQPQQAFPQPQQTF

SEQ ID NO: 776 - protein, 20 aa, Artificial Sequence
  gluten peptide
PQQQPPFSQQQPSFSQQQPP

SEQ ID NO: 777 - protein, 16 aa, Artificial Sequence
  gluten peptide
GQQAFPQPEQTFPHQG

SEQ ID NO: 778 - protein, 20 aa, Artificial Sequence
  gluten peptide
QAFPQPQQTFPHQPQQQFPQ

SEQ ID NO: 779 - protein, 20 aa, Artificial Sequence
  gluten peptide
QAFPQPQQTFPHQPQQQFPQ

SEQ ID NO: 780 - protein, 16 aa, Artificial Sequence
  gluten peptide
GQQAFPQPQQTFPHQG

SEQ ID NO: 781 - protein, 20 aa, Artificial Sequence
  gluten peptide
QTFPHQPQQAFPQPQQTFPH

SEQ ID NO: 782 - protein, 20 aa, Artificial Sequence
  gluten peptide
QQAFPQPQQTFPHQPQQQFP

SEQ ID NO: 783 - protein, 20 aa, Artificial Sequence
  gluten peptide
PQQTFPHQPQQAFPQPQQTF

SEQ ID NO: 784 - protein, 20 aa, Artificial Sequence
  gluten peptide
QQFPEQSQQPFTQPQQPTPI

SEQ ID NO: 785 - protein, 20 aa, Artificial Sequence
  gluten peptide
FPEQSQQPFTQPQQPTPIQP

SEQ ID NO: 786 - protein, 20 aa, Artificial Sequence
  gluten peptide
LQPFPQPQPFLPQLPYPQPQ

SEQ ID NO: 787 - protein, 20 aa, Artificial Sequence
  gluten peptide
LQLQPFPQPQPFPPQLPYPQ

SEQ ID NO: 788 - protein, 20 aa, Artificial Sequence
  gluten peptide
LQLQPFPQPQPFLPQLPYPQ

SEQ ID NO: 789 - protein, 20 aa, Artificial Sequence
  gluten peptide
LQLQPFPQPQPFPPQLPYPQ

SEQ ID NO: 790 - protein, 20 aa, Artificial Sequence
  gluten peptide
MQLQPFPQPQPFPPQLPYPQ

SEQ ID NO: 791 - protein, 20 aa, Artificial Sequence
  gluten peptide
PFPSQQPYMQLQPFPQPQPF

SEQ ID NO: 792 - protein, 20 aa, Artificial Sequence
  gluten peptide
FPSQQPYLQLQPFPQPQPFL

SEQ ID NO: 793 - protein, 20 aa, Artificial Sequence
  gluten peptide
PFPSQQPYLQLQPFPQPQPF

SEQ ID NO: 794 - protein, 20 aa, Artificial Sequence
  gluten peptide
SQQPYLQLQPFPQPQPFPPQ

SEQ ID NO: 795 - protein, 20 aa, Artificial Sequence
  gluten peptide
PFPSQQPYMQLQPFPQPQPF

SEQ ID NO: 796 - protein, 20 aa, Artificial Sequence
  gluten peptide
QQPYLQLQPFPRPQLPYPQP

SEQ ID NO: 797 - protein, 16 aa, Artificial Sequence
  gluten peptide
GLQPFPRPELPYPQPG

SEQ ID NO: 798 - protein, 20 aa, Artificial Sequence
  gluten peptide
LQLQPFPRPQLPYPQPQPFR

SEQ ID NO: 799 - protein, 16 aa, Artificial Sequence
  gluten peptide
GLQPFPRPQLPYPQPG

SEQ ID NO: 800 - protein, 16 aa, Artificial Sequence
  gluten peptide
GQQIFPQPEQTFPHQG

SEQ ID NO: 801 - protein, 16 aa, Artificial Sequence
  gluten peptide
GQQIFPQPQQTFPHQG

SEQ ID NO: 802 - protein, 20 aa, Artificial Sequence
  gluten peptide
QQIFPQPQQTFPHQPQQAFP

SEQ ID NO: 803 - protein, 20 aa, Artificial Sequence
  gluten peptide
PQQIFPQPQQTFPHQPQQQF

SEQ ID NO: 804 - protein, 20 aa, Artificial Sequence
  gluten peptide
QQIFPQPQQTFPHQPQQQFP

SEQ ID NO: 805 - protein, 20 aa, Artificial Sequence
  gluten peptide
QQPFSQQPQQIFPQPQQTFP

SEQ ID NO: 806 - protein, 20 aa, Artificial Sequence
  gluten peptide
HQPFSQQPQQIFPQPQQTFP

SEQ ID NO: 807 - protein, 20 aa, Artificial Sequence
  gluten peptide
QPQQPFSQQPQQIFPQPQQT

SEQ ID NO: 808 - protein, 20 aa, Artificial Sequence
  gluten peptide
PQQQFIQPQQPQQTYPQRPQ

SEQ ID NO: 809 - protein, 20 aa, Artificial Sequence
  gluten peptide
QPQQQFIQPQQPQQTYPQRP

SEQ ID NO: 810 - protein, 20 aa, Artificial Sequence
  gluten peptide
QPFPQQPQQTYPQRPQQPFP

SEQ ID NO: 811 - protein, 20 aa, Artificial Sequence
  gluten peptide
PQQPFPQQPQQTYPQRPQQP

SEQ ID NO: 812 - protein, 20 aa, Artificial Sequence
  gluten peptide
PQQQFIQPQQPQQTYPQRPQ

SEQ ID NO: 813 - protein, 20 aa, Artificial Sequence
  gluten peptide
QQPFPQQPQQTYPQRPQQPF

SEQ ID NO: 814 - protein, 20 aa, Artificial Sequence
  gluten peptide
QQPFPQQPQQTYPQRPQQPF

SEQ ID NO: 815 - protein, 20 aa, Artificial Sequence
  gluten peptide
QQTYPQRPQQPFPQTQQPQQ

SEQ ID NO: 816 - protein, 20 aa, Artificial Sequence
  gluten peptide
QPFPQQPQQTYPQRPQQPFP

SEQ ID NO: 817 - protein, 16 aa, Artificial Sequence
  gluten peptide
GQTYPQRPQQPFPQTG

SEQ ID NO: 818 - protein, 16 aa, Artificial Sequence
  gluten peptide
GQTYPQRPEQPFPQTG

SEQ ID NO: 819 - protein, 20 aa, Artificial Sequence
  gluten peptide
QQPFPQQPQQTYPQRPQQPF

SEQ ID NO: 820 - protein, 20 aa, Artificial Sequence
  gluten peptide
QQPFPQQPQQTYPQRPQQPF

SEQ ID NO: 821 - protein, 20 aa, Artificial Sequence
  gluten peptide
QQTYPQRPQQPFPQTQQPQQ

SEQ ID NO: 822 - protein, 20 aa, Artificial Sequence
  gluten peptide
QTYPQRPQQPFPQTQQPQQP

SEQ ID NO: 823 - protein, 20 aa, Artificial Sequence
  gluten peptide
YLQLQPFPQPQLPYPQPQLP

SEQ ID NO: 824 - protein, 20 aa, Artificial Sequence
  gluten peptide
PYMQLQPFPQPQLPYPQPQL

SEQ ID NO: 825 - protein, 17 aa, Artificial Sequence
  gluten peptide
QLQPFPQPQLPYPQPQL

SEQ ID NO: 826 - protein, 16 aa, Artificial Sequence
  gluten peptide
GLQPFPQPELPYPQPG

SEQ ID NO: 827 - protein, 20 aa, Artificial Sequence
  gluten peptide
LQLQPFPQPQLPYPQPQPFR

SEQ ID NO: 828 - protein, 17 aa, Artificial Sequence
  gluten peptide
QLQPFPQPELPYPQPQP

SEQ ID NO: 829 - protein, 20 aa, Artificial Sequence
  gluten peptide
LQLQPFPQPQLPYPQPQPFR

SEQ ID NO: 830 - protein, 33 aa, Artificial Sequence; identical to SEQ ID NO: 249
  gluten peptide

SEQ ID NO: 831 - protein, 20 aa, Artificial Sequence
  gluten peptide
MQLQPFPQPQLPYPQPQLPY

SEQ ID NO: 832 - protein, 16 aa, Artificial Sequence
  gluten peptide
GLQPFPQPELPFPQPG

SEQ ID NO: 833 - protein, 17 aa, Artificial Sequence
  gluten peptide
QLQPFPQPELPYPQPQL

SEQ ID NO: 834 - protein, 17 aa, Artificial Sequence
  gluten peptide
QLQPFPQPQLPYPQPQP

SEQ ID NO: 835 - protein, 16 aa, Artificial Sequence
  gluten peptide
GLQPFPQPQLPYPQPG

SEQ ID NO: 836 - protein, 20 aa, Artificial Sequence
  gluten peptide
LQPFPQPELPYPQPELPYPF

SEQ ID NO: 837 - protein, 20 aa, Artificial Sequence
  gluten peptide
LQLQPFPQPQLPYPQPQLPY

SEQ ID NO: 838 - protein, 16 aa, Artificial Sequence
  gluten peptide
GLQPFPQPQLPFPQPG

SEQ ID NO: 839 - protein, 16 aa, Artificial Sequence
  gluten peptide
GLQPFPQPELPYLQPG

SEQ ID NO: 840 - protein, 20 aa, Artificial Sequence
  gluten peptide
PYLQLQPFPQPQLPYSQPQP

SEQ ID NO: 841 - protein, 16 aa, Artificial Sequence
  gluten peptide
GLQPFPQPELPYSQPG

SEQ ID NO: 842 - protein, 20 aa, Artificial Sequence
  gluten peptide
LQLQPFPQPQLPYLQPQPFR

SEQ ID NO: 843 - protein, 20 aa, Artificial Sequence
  gluten peptide
LQLQPFPQPQLPYLQPQPFR

SEQ ID NO: 844 - protein, 20 aa, Artificial Sequence
  gluten peptide
LQLQPFPQPQLPYSQPQPFR

SEQ ID NO: 845 - protein, 33 aa, Artificial Sequence; identical to SEQ ID NO: 263
  gluten peptide

SEQ ID NO: 846 - protein, 16 aa, Artificial Sequence
  gluten peptide
GLQPFPQPQLPYSQPG

SEQ ID NO: 847 - protein, 20 aa, Artificial Sequence
  gluten peptide
LQLQPFPQPQLPYSQPQQFR

SEQ ID NO: 848 - protein, 16 aa, Artificial Sequence
  gluten peptide
GLQPFPQPQLPYLQPG

SEQ ID NO: 849 - protein, 16 aa, Artificial Sequence
  gluten peptide
GLQPFPQPELSYSQPG

SEQ ID NO: 850 - protein, 20 aa, Artificial Sequence
  gluten peptide
QFPSQLPYLQLQPFPQPQLP

SEQ ID NO: 851 - protein, 20 aa, Artificial Sequence
  gluten peptide
LQLQPFPQPQLSYSQPQPFR

SEQ ID NO: 852 - protein, 20 aa, Artificial Sequence
  gluten peptide
LQLQPFPQPQLSYSQPQPFR

SEQ ID NO: 853 - protein, 15 aa, Artificial Sequence
  gluten peptide
GSGLQPFPQPELGSG

SEQ ID NO: 854 - protein, 20 aa, Artificial Sequence
  gluten peptide
PFPSQQPYMQLQPFPQPQLP

SEQ ID NO: 855 - protein, 16 aa, Artificial Sequence
  gluten peptide
GLQPFPQPQLSYSQPG

SEQ ID NO: 856 - protein, 20 aa, Artificial Sequence
  gluten peptide
PFPSQLPYLQLQPFPQPQLP

SEQ ID NO: 857 - protein, 20 aa, Artificial Sequence
  gluten peptide
PFPSQQPYLQLQPFPQPQLP

SEQ ID NO: 858 - protein, 20 aa, Artificial Sequence
  gluten peptide
PFPSQQPYLQLQPFPQPQLP

SEQ ID NO: 859 - protein, 20 aa, Artificial Sequence
  gluten peptide
PFPWQPQQPFPQTQQSFPLQ

SEQ ID NO: 860 - protein, 20 aa, Artificial Sequence
  gluten peptide
QPFPQTQQSFPLQPQQPFPQ

SEQ ID NO: 861 - protein, 20 aa, Artificial Sequence
  gluten peptide
FPWQPQQPFPQTQQSFPLQP

SEQ ID NO: 862 - protein, 20 aa, Artificial Sequence
  gluten peptide
METSCIPGLERPWQQQPLQQ

SEQ ID NO: 863 - protein, 20 aa, Artificial Sequence
  gluten peptide
ETSCIPGLERPWQEQPLPPQ

SEQ ID NO: 864 - protein, 20 aa, Artificial Sequence
  gluten peptide
SQQQPILPRGPPFSQQTQPV

SEQ ID NO: 865 - protein, 16 aa, Artificial Sequence
  gluten peptide
GFFPQPEQEFPQPQQG

SEQ ID NO: 866 - protein, 16 aa, Artificial Sequence
  gluten peptide
GQQPFPQPEQEFPQPG

SEQ ID NO: 867 - protein, 20 aa, Artificial Sequence
  gluten peptide
SQQPQQPFPQPQQQFPQPQQ

SEQ ID NO: 868 - protein, 16 aa, Artificial Sequence
  gluten peptide
GQQPFPQPEQQFPQPG

SEQ ID NO: 869 - protein, 20 aa, Artificial Sequence
  gluten peptide
SQQPQQPFPQPQQQFPQPQQ

SEQ ID NO: 870 - protein, 20 aa, Artificial Sequence
  gluten peptide
PQQPFPQQPQQQFPQPQQPQ

SEQ ID NO: 871 - protein, 20 aa, Artificial Sequence
  gluten peptide
QPFPQPQQQFPQPQQPQQSF

SEQ ID NO: 872 - protein, 16 aa, Artificial Sequence
  gluten peptide
GQPFPQQPEQEFPQPG

SEQ ID NO: 873 - protein, 20 aa, Artificial Sequence
  gluten peptide
QQPQQPFPQQPQQQFPQPQQ

SEQ ID NO: 874 - protein, 16 aa, Artificial Sequence
  gluten peptide
GQQQFSQPEQEFPQPG

SEQ ID NO: 875 - protein, 16 aa, Artificial Sequence
  gluten peptide
GFFPQPQQEFPQPQQG

SEQ ID NO: 876 - protein, 20 aa, Artificial Sequence
  gluten peptide
SQQPQQPFPQPQQQFPQPQQ

SEQ ID NO: 877 - protein, 16 aa, Artificial Sequence
  gluten peptide
GFFPQPQQQFPQPQQG

SEQ ID NO: 878 - protein, 16 aa, Artificial Sequence
  gluten peptide
GQQQFSQPQQQFPQPG

SEQ ID NO: 879 - protein, 16 aa, Artificial Sequence
  gluten peptide
GQPFPQQPEQQFPQPG

SEQ ID NO: 880 - protein, 16 aa, Artificial Sequence
  gluten peptide
GQQPFPQPQQQFPQPG

SEQ ID NO: 881 - protein, 20 aa, Artificial Sequence
  gluten peptide
QQPQQQFPQPQQPQQPFPQP

SEQ ID NO: 882 - protein, 16 aa, Artificial Sequence
  gluten peptide
GQTFPHQPEQQFPQPG

SEQ ID NO: 883 - protein, 16 aa, Artificial Sequence
  gluten peptide
GFPQQPEQEFPQPQQG

SEQ ID NO: 884 - protein, 20 aa, Artificial Sequence
  gluten peptide
PQQPFPQQPQQQFPQPQQPQ

SEQ ID NO: 885 - protein, 16 aa, Artificial Sequence
  gluten peptide
GQQQFSQPEQQFPQPG

SEQ ID NO: 886 - protein, 16 aa, Artificial Sequence
  gluten peptide
GFFSQPQQEFPQPQQG

SEQ ID NO: 887 - protein, 20 aa, Artificial Sequence
  gluten peptide
PQPQQQFPQPQQPQQSFPQQ

SEQ ID NO: 888 - protein, 16 aa, Artificial Sequence
  gluten peptide
GFPQQPQQEFPQPQQG

SEQ ID NO: 889 - protein, 20 aa, Artificial Sequence
  gluten peptide
SQQPQQQFSQPQQQFPQPQQ

SEQ ID NO: 890 - protein, 20 aa, Artificial Sequence
  gluten peptide
SQQPQQQFSQPQQQFPQPQQ

SEQ ID NO: 891 - protein, 15 aa, Artificial Sequence
  gluten peptide
QQFSQPEQEFPQPQQ

SEQ ID NO: 892 - protein, 20 aa, Artificial Sequence
  gluten peptide
QSQQPQQQFSQPQQQFPQPQ

SEQ ID NO: 893 - protein, 20 aa, Artificial Sequence
  gluten peptide
QPQQQFSQPQQQFPQPQQPQ

SEQ ID NO: 894 - protein, 16 aa, Artificial Sequence
  gluten peptide
GQPFPQQPQQQFPQPG

SEQ ID NO: 895 - protein, 20 aa, Artificial Sequence
  gluten peptide
QQPQQPFPQQPQQQFPQPQQ

SEQ ID NO: 896 - protein, 20 aa, Artificial Sequence
  gluten peptide
PQQPQQPFPQQPQQQFPQPQ

SEQ ID NO: 897 - protein, 20 aa, Artificial Sequence
  gluten peptide
TFPQPQQTCPHQPQQQFPQP

SEQ ID NO: 898 - protein, 16 aa, Artificial Sequence
  gluten peptide
GFFSQPQQQFPQPQQG

SEQ ID NO: 899 - protein, 20 aa, Artificial Sequence
  gluten peptide
TFPHQPQQQFPQPQQPQQPF

SEQ ID NO: 900 - protein, 20 aa, Artificial Sequence
  gluten peptide
QTFPHQPQQQFPQPQQPQQQ

SEQ ID NO: 901 - protein, 16 aa, Artificial Sequence
  gluten peptide
GFPQQPQQQFPQPQQG

SEQ ID NO: 902 - protein, 20 aa, Artificial Sequence
  gluten peptide
SQPQQQFPQPQQPQQSFPQQ

SEQ ID NO: 903 - protein, 20 aa, Artificial Sequence
  gluten peptide
QTCPHQPQQQFPQPQQPQQP

SEQ ID NO: 904 - protein, 16 aa, Artificial Sequence
  gluten peptide
GQTFPHQPQQQFPQPG

SEQ ID NO: 905 - protein, 20 aa, Artificial Sequence
  gluten peptide
NMQADPSGQVQWPQQQPFLQ

SEQ ID NO: 906 - protein, 20 aa, Artificial Sequence
  gluten peptide
ATANMQADPSGQVQWPQQQP

SEQ ID NO: 907 - protein, 20 aa, Artificial Sequence
  gluten peptide
FDEEKNSTGALCSSLSNQAS

SEQ ID NO: 908 - protein, 20 aa, Artificial Sequence
  gluten peptide
QPPFPQQHQQFPQQQIPVVQ

SEQ ID NO: 909 - protein, 20 aa, Artificial Sequence
  gluten peptide
QQPLFPQQHQQFPQQQIPVV

SEQ ID NO: 910 - protein, 20 aa, Artificial Sequence
  gluten peptide
QFPQQQIPVVQPSVLQQLNP

SEQ ID NO: 911 - protein, 20 aa, Artificial Sequence
  gluten peptide
SQQQQPFPQQQQPLLLQQPP

SEQ ID NO: 912 - protein, 20 aa, Artificial Sequence
  gluten peptide
QQQQPILLQQPPFSQHQQPV

SEQ ID NO: 913 - protein, 20 aa, Artificial Sequence
  gluten peptide
QQQPFPQQQQPLLLQQPPFS

SEQ ID NO: 914 - protein, 20 aa, Artificial Sequence
  gluten peptide
QQQQPPFSQQQQQPILLQQP

SEQ ID NO: 915 - protein, 20 aa, Artificial Sequence
  gluten peptide
PFSQQQQPVLLQQQIPFVHP

SEQ ID NO: 916 - protein, 20 aa, Artificial Sequence
  gluten peptide
QQQPFPQQQQPLLLQQPPFS

SEQ ID NO: 917 - protein, 20 aa, Artificial Sequence
  gluten peptide
QQPLSQQPQQTFPQPQQTFP

SEQ ID NO: 918 - protein, 20 aa, Artificial Sequence
  gluten peptide
HQPFSQQPQQTFPQPQQTFP

SEQ ID NO: 919 - protein, 20 aa, Artificial Sequence
  gluten peptide
QPFPQPHQPFSQQPQQTFPQ

SEQ ID NO: 920 - protein, 16 aa, Artificial Sequence
  gluten peptide
GQPLSQQPQQTFPQQG

SEQ ID NO: 921 - protein, 20 aa, Artificial Sequence
  gluten peptide
PVPQPHQPFSQQPQQTFPQP

SEQ ID NO: 922 - protein, 16 aa, Artificial Sequence
  gluten peptide
GQPLSQQPEQTFPQQG

SEQ ID NO: 923 - protein, 20 aa, Artificial Sequence
  gluten peptide
QQLVPQLQQPLSQQPQQTFP

SEQ ID NO: 924 - protein, 20 aa, Artificial Sequence
  gluten peptide
PQLQQPLSQQPQQTFPQPQQ

SEQ ID NO: 925 - protein, 20 aa, Artificial Sequence
  gluten peptide
PHQTFHHQPQQTFPQPQQTY

SEQ ID NO: 926 - protein, 20 aa, Artificial Sequence
  gluten peptide
QTFHHQPQQTFPQPEQTYPH

SEQ ID NO: 927 - protein, 20 aa, Artificial Sequence
  gluten peptide
QTFHHQPQQTFPQPQQTYPH

SEQ ID NO: 928 - protein, 20 aa, Artificial Sequence
  gluten peptide
QRTIPQPHQTFHHQPQQTFP

SEQ ID NO: 929 - protein, 20 aa, Artificial Sequence
  gluten peptide
SGQGQHWYYPTSPKLSGQGQ

SEQ ID NO: 930 - protein, 20 aa, Artificial Sequence
  gluten peptide
TFPHQPQQQFSQPQQPQQQF

SEQ ID NO: 931 - protein, 20 aa, Artificial Sequence
  gluten peptide
QTFPHQPQQQFSQPQQPQQQ

SEQ ID NO: 932 - protein, 20 aa, Artificial Sequence
  gluten peptide
QQQTLQQILQQQLIPCRDVV

SEQ ID NO: 933 - protein, 20 aa, Artificial Sequence
  gluten peptide
TLQQILQQQLIPCRDVVLQQ

SEQ ID NO: 934 - protein, 20 aa, Artificial Sequence
  gluten peptide
QQQQQQQQTLQQILQQQLIP

SEQ ID NO: 935 - protein, 20 aa, Artificial Sequence
  gluten peptide
PWLQQPLPPQQTLPQQLQQP

SEQ ID NO: 936 - protein, 20 aa, Artificial Sequence
  gluten peptide
SNIIISFLKPWLQQPLPPQQ

SEQ ID NO: 937 - protein, 20 aa, Artificial Sequence
  gluten peptide
QGQQGYYPISPQQSGQGQQP

SEQ ID NO: 938 - protein, 20 aa, Artificial Sequence
  gluten peptide
PYPQPQPFPQPQPFPPQLPY

SEQ ID NO: 939 - protein, 20 aa, Artificial Sequence
  gluten peptide
PFPSQQPYPQPQPFPQPQPF

SEQ ID NO: 940 - protein, 20 aa, Artificial Sequence
  gluten peptide
PQPQPFPQPQPFPPQLPYPQ

SEQ ID NO: 941 - protein, 20 aa, Artificial Sequence
  gluten peptide
PYPQPQPFPQPQPFPPQLPY

SEQ ID NO: 942 - protein, 20 aa, Artificial Sequence
  gluten peptide
QQPFPSQQPYPQPQPFPQPQ

SEQ ID NO: 943 - protein, 20 aa, Artificial Sequence
  gluten peptide
PFPSQQPYPQPQPFPQPQPF

SEQ ID NO: 944 - protein, 20 aa, Artificial Sequence
  gluten peptide
PQPQPFPQPQPFPPQLPYPQ

SEQ ID NO: 945 - protein, 20 aa, Artificial Sequence
  gluten peptide
PQQQFIQPQQPFPQQPQQTY

SEQ ID NO: 946 - protein, 20 aa, Artificial Sequence
  gluten peptide
QQQFIQPQQPFPQQPQQTYP

SEQ ID NO: 947 - protein, 20 aa, Artificial Sequence
  gluten peptide
PQQQFIQPQQPFPQQPQQTY

SEQ ID NO: 948 - protein, 20 aa, Artificial Sequence
  gluten peptide
PQQPQQPFPQQPQQSFPQQP

SEQ ID NO: 949 - protein, 16 aa, Artificial Sequence
  gluten peptide
GQPFPQQPEQSFPQQG

SEQ ID NO: 950 - protein, 20 aa, Artificial Sequence
  gluten peptide
QPFPQQPQQTYPQRPQQPFP

SEQ ID NO: 951 - protein, 16 aa, Artificial Sequence
  gluten peptide
GQPQQPFPEQPQQSFG

SEQ ID NO: 952 - protein, 16 aa, Artificial Sequence
  gluten peptide
GQPQQPFPQQPQQSFG

SEQ ID NO: 953 - protein, 20 aa, Artificial Sequence
  gluten peptide
PQQPFPQQPQQSFPQQPQQP

SEQ ID NO: 954 - protein, 20 aa, Artificial Sequence
  gluten peptide
PQQPFPQQPQQTYPQRPQQP

SEQ ID NO: 955 - protein, 16 aa, Artificial Sequence
  gluten peptide
GQPFPQQPQQSFPQQG

SEQ ID NO: 956 - protein, 16 aa, Artificial Sequence
  gluten peptide
GQPQQPFPEQPQQTFG

SEQ ID NO: 957 - protein, 20 aa, Artificial Sequence
  gluten peptide
PFPQQPQQPFPQQPQQSFPQ

SEQ ID NO: 958 - protein, 16 aa, Artificial Sequence
  gluten peptide
GQPQQPFPQQPQQTFG

SEQ ID NO: 959 - protein, 20 aa, Artificial Sequence
  gluten peptide
QQPFPQQPQQTYPQRPQQPF

SEQ ID NO: 960 - protein, 20 aa, Artificial Sequence
  gluten peptide
QQPFPQQPQQTYPQRPQQPF

SEQ ID NO: 961 - protein, 20 aa, Artificial Sequence
  gluten peptide
PWQQQPLPPQQSFSQQPPFS

SEQ ID NO: 962 - protein, 20 aa, Artificial Sequence
  gluten peptide
PWQQQPLPPQQSFSQQPPFS

SEQ ID NO: 963 - protein, 20 aa, Artificial Sequence
  gluten peptide
ERPWQQQPLPPQQSFSQQPP

SEQ ID NO: 964 - protein, 20 aa, Artificial Sequence
  gluten peptide
PQQSFSQQPPFSQQQQQPLP

SEQ ID NO: 965 - protein, 20 aa, Artificial Sequence
  gluten peptide
QQSFSQQPPFSQQQQQPLPQ

SEQ ID NO: 966 - protein, 20 aa, Artificial Sequence
  gluten peptide
QPLPPQQSFSQQPPFSQQQQ

SEQ ID NO: 967 - protein, 20 aa, Artificial Sequence
  gluten peptide
PWQQQPLPPQQSFSQQPPFS

SEQ ID NO: 968 - protein, 20 aa, Artificial Sequence
  gluten peptide
YPQQPFPQQPQQPFPQQPPF

SEQ ID NO: 969 - protein, 20 aa, Artificial Sequence
  gluten peptide
YQQQPFPQQPYPQQPYPSQQ

SEQ ID NO: 970 - protein, 20 aa, Artificial Sequence
  gluten peptide
LPQPYAQPYLPYPQQPFPQQ

SEQ ID NO: 971 - protein, 20 aa, Artificial Sequence
  gluten peptide
PQQSFSYQQQPFPQQPYPQQ

SEQ ID NO: 972 - protein, 20 aa, Artificial Sequence
  gluten peptide
PFPQQPYPQQPYPSQQPYPS

SEQ ID NO: 973 - protein, 20 aa, Artificial Sequence
  gluten peptide
QELQSPQQLYPQQPYPQQPY

SEQ ID NO: 974 - protein, 20 aa, Artificial Sequence
  gluten peptide
YAQPYLPYPQQPFPQQPQQP

SEQ ID NO: 975 - protein, 20 aa, Artificial Sequence
  gluten peptide
QQPFPQQPYPQQPYPSQQPY

SEQ ID NO: 976 - protein, 20 aa, Artificial Sequence
  gluten peptide
QPSSQQPLSQQHQQFPQQQI

SEQ ID NO: 977 - protein, 20 aa, Artificial Sequence
  gluten peptide
QQPPFSQQQQPSSQQPLSQQ

SEQ ID NO: 978 - protein, 20 aa, Artificial Sequence
  gluten peptide
GLERPWQQQPLQQKETFPQQ

SEQ ID NO: 979 - protein, 20 aa, Artificial Sequence
  gluten peptide
QQGYYPISPQQLGQGQQSGQ

SEQ ID NO: 980 - protein, 20 aa, Artificial Sequence
  gluten peptide
QSSCHVMQQQCCQRLPQIPE

SEQ ID NO: 981 - protein, 20 aa, Artificial Sequence
  gluten peptide
GQQAGQGQQGYYPTSPQQLG

SEQ ID NO: 982 - protein, 20 aa, Artificial Sequence
  gluten peptide
GQVQWPQQQPFPQPQQPFCE

SEQ ID NO: 983 - protein, 20 aa, Artificial Sequence
  gluten peptide
PQQQQPFPQPQQPFSQQPQQ

SEQ ID NO: 984 - protein, 20 aa, Artificial Sequence
  gluten peptide
WPQQQPFPQPQQPFCQQPQQ

SEQ ID NO: 985 - protein, 20 aa, Artificial Sequence
  gluten peptide
QQQQPFPQPQQPQQPFPQPQ

SEQ ID NO: 986 - protein, 20 aa, Artificial Sequence
  gluten peptide
PSGQVQWPQQQPFPQPQQPF

SEQ ID NO: 987 - protein, 20 aa, Artificial Sequence
  gluten peptide
PQQQPFPQPQQPFCEQPQRT

SEQ ID NO: 988 - protein, 20 aa, Artificial Sequence
  gluten peptide
QQQPFPQPQQPFCQQPQRTI

SEQ ID NO: 989 - protein, 20 aa, Artificial Sequence
  gluten peptide
PSGQVQWPQQQQPFPQPQQP

SEQ ID NO: 990 - protein, 20 aa, Artificial Sequence
  gluten peptide
QQQQPFPQPQQPFSQQPQQI

SEQ ID NO: 991 - protein, 20 aa, Artificial Sequence
  gluten peptide
GQVQWPQQQQPFPQPQQPQQ

SEQ ID NO: 992 - protein, 20 aa, Artificial Sequence
  gluten peptide
PSGQVQWPQQQQPFPQPQQP

SEQ ID NO: 993 - protein, 20 aa, Artificial Sequence
  gluten peptide
QQQPFPQPQQPFCEQPQRTI

SEQ ID NO: 994 - protein, 20 aa, Artificial Sequence
  gluten peptide
VDPSGQVQWPQQQQPFPQPQ

SEQ ID NO: 995 - protein, 20 aa, Artificial Sequence
  gluten peptide
PSGQVQWPQQQQPFPQPQQP

SEQ ID NO: 996 - protein, 20 aa, Artificial Sequence
  gluten peptide
NIQVDPSGQVQWPQQQQPFP

SEQ ID NO: 997 - protein, 20 aa, Artificial Sequence
  gluten peptide
GQVQWPQQQQPFPQPQQPQQ

SEQ ID NO: 998 - protein, 20 aa, Artificial Sequence
  gluten peptide
PSGQVQWPQQQQPFPQPQQP

SEQ ID NO: 999 - protein, 20 aa, Artificial Sequence
  gluten peptide
TTANIQVDPSGQVQWPQQQQ

SEQ ID NO: 1000 - protein, 20 aa, Artificial Sequence
  gluten peptide
VDPSGQVQWPQQQQPFPQPQ

SEQ ID NO: 1001 - protein, 19 aa, Artificial Sequence
  gluten peptide
QIVFPSGQVQWPQQQQPFP

SEQ ID NO: 1002 - protein, 16 aa, Artificial Sequence
  gluten peptide
GQVQWPQQEQPFPQQG

SEQ ID NO: 1003 - protein, 16 aa, Artificial Sequence
  gluten peptide
GQVQWPQQQQPFPQQG

SEQ ID NO: 1004 - protein, 20 aa, Artificial Sequence
  gluten peptide
QSTYQPLQQLCCQQLWQIPE

SEQ ID NO: 1005 - protein, 20 aa, Artificial Sequence
  gluten peptide
QSTYQPLQQLCCQQLWQIPE

SEQ ID NO: 1006 - protein, 20 aa, Artificial Sequence
  gluten peptide
QSTYQPLQQLCCQQLWQIPE

SEQ ID NO: 1007 - protein, 20 aa, Artificial Sequence
  gluten peptide
PPQQPYPQPQFPSQLPYLQL

SEQ ID NO: 1008 - protein, 20 aa, Artificial Sequence
  gluten peptide
GQQQPFPPQQPYPQPQFPSQ

SEQ ID NO: 1009 - protein, 20 aa, Artificial Sequence
  gluten peptide
QQPFPPQQPYPQPQFPSQLP

SEQ ID NO: 1010 - protein, 20 aa, Artificial Sequence
  gluten peptide
QQPYPQPQFPSQLPYLQLQP

SEQ ID NO: 1011 - protein, 20 aa, Artificial Sequence
  gluten peptide
FEEIRNLALQTLPSMCNVYI

SEQ ID NO: 1012 - protein, 20 aa, Artificial Sequence
  gluten peptide
RNLALQTLPSMCNVYIPPYC

SEQ ID NO: 1013 - protein, 20 aa, Artificial Sequence
  gluten peptide
EIRNLALQTLPSMCNVYIPP

SEQ ID NO: 1014 - protein, 20 aa, Artificial Sequence
  gluten peptide
ELCCQHLWQIPEKLQCQAIH

SEQ ID NO: 1015 - protein, 20 aa, Artificial Sequence
  gluten peptide
ELCCQHLWQIPEKLQCQAIH

SEQ ID NO: 1016 - protein, 16 aa, Artificial Sequence
  gluten peptide
GLCCQHLWEIPEKLQG

SEQ ID NO: 1017 - protein, 16 aa, Artificial Sequence
  gluten peptide
GLCCQHLWQIPEKLQG

SEQ ID NO: 1018 - protein, 20 aa, Artificial Sequence
  gluten peptide
LCCQHLWQIPEKLQCQAIHN

SEQ ID NO: 1019 - protein, 20 aa, Artificial Sequence
  gluten peptide
PFPWQPQQPFPQTQQSFPLQ

SEQ ID NO: 1020 - protein, 20 aa, Artificial Sequence
  gluten peptide
QPFPQTQQSFPLQPQQPFPQ

SEQ ID NO: 1021 - protein, 20 aa, Artificial Sequence
  gluten peptide
FPWQPQQPFPQTQQSFPLQP

SEQ ID NO: 1022 - protein, 20 aa, Artificial Sequence
  gluten peptide
PFPQTQQSFPLQPQQPFPQQ

SEQ ID NO: 1023 - protein, 20 aa, Artificial Sequence
  gluten peptide
GQGFFQPSQQNPQAQGSFQP

SEQ ID NO: 1024 - protein, 16 aa, Artificial Sequence
  gluten peptide
GQGFFQPSQQNPQAQG

SEQ ID NO: 1025 - protein, 20 aa, Artificial Sequence
  gluten peptide
QQYPSGQGFFQPSQQNPQAQ

SEQ ID NO: 1026 - protein, 20 aa, Artificial Sequence
  gluten peptide
QQYPSGQGFFQPSQQNPQAQ

SEQ ID NO: 1027 - protein, 16 aa, Artificial Sequence
  gluten peptide
GQGFFQPSEQNPQAQG

SEQ ID NO: 1028 - protein, 20 aa, Artificial Sequence
  gluten peptide
PSGQGFFQPSQQNPQAQGSF

SEQ ID NO: 1029 - protein, 20 aa, Artificial Sequence
  gluten peptide
QQYPSGQGFFQPSQQNPQAQ

SEQ ID NO: 1030 - protein, 20 aa, Artificial Sequence
  gluten peptide
ARSQTLWQSSCHVMQQQCCR

SEQ ID NO: 1031 - protein, 20 aa, Artificial Sequence
  gluten peptide
LLQQCKPVSLVSSLWSIILP

SEQ ID NO: 1032 - protein, 20 aa, Artificial Sequence
  gluten peptide
LVSSLWSIILPPSDCQVMRQ

SEQ ID NO: 1033 - protein, 20 aa, Artificial Sequence
  gluten peptide
LVSSLWSIILPPSDCQVMRQ

SEQ ID NO: 1034 - protein, 16 aa, Artificial Sequence
  gluten peptide
GQQTFPQPEQTFPHQG

SEQ ID NO: 1035 - protein, 20 aa, Artificial Sequence
  gluten peptide
QQTFPQPQQTFPHQPQQQFP

SEQ ID NO: 1036 - protein, 16 aa, Artificial Sequence
  gluten peptide
GQQTFPQPQQTFPHQG

SEQ ID NO: 1037 - protein, 20 aa, Artificial Sequence
  gluten peptide
QQPQQTFPQPQQTFPHQPQQ

SEQ ID NO: 1038 - protein, 20 aa, Artificial Sequence
  gluten peptide
PHQTFHHQPQQTFPQPQQTY

SEQ ID NO: 1039 - protein, 20 aa, Artificial Sequence
  gluten peptide
QQPLSQQPQQTFPQPQQTFP

SEQ ID NO: 1040 - protein, 20 aa, Artificial Sequence
  gluten peptide
QTFPQPQQTYPHQPQQQFPQ

SEQ ID NO: 1041 - protein, 20 aa, Artificial Sequence
  gluten peptide
HQPFSQQPQQTFPQPQQTFP

SEQ ID NO: 1042 - protein, 20 aa, Artificial Sequence
  gluten peptide
QQTFPQPQQTFPHQPQQQVP

SEQ ID NO: 1043 - protein, 20 aa, Artificial Sequence
  gluten peptide
QTFPQPEQTYPHQPQQQFPQ

SEQ ID NO: 1044 - protein, 20 aa, Artificial Sequence
  gluten peptide
QTFHHQPQQTFPQPEQTYPH

SEQ ID NO: 1045 - protein, 20 aa, Artificial Sequence
  gluten peptide
HHQPQQTFPQPEQTYPHQPQ

SEQ ID NO: 1046 - protein, 20 aa, Artificial Sequence
  gluten peptide
QQTFPQPQQTFPHQPQQQFS

SEQ ID NO: 1047 - protein, 20 aa, Artificial Sequence
  gluten peptide
QTFPQPQQTYPHQPQQQFPQ

SEQ ID NO: 1048 - protein, 20 aa, Artificial Sequence
  gluten peptide
QTFHHQPQQTFPQPQQTYPH

SEQ ID NO: 1049 - protein, 20 aa, Artificial Sequence
  gluten peptide
HHQPQQTFPQPQQTYPHQPQ

SEQ ID NO: 1050 - protein, 20 aa, Artificial Sequence
  gluten peptide
MENSHIPGLERPSRQQPLPP

SEQ ID NO: 1051 - protein, 20 aa, Artificial Sequence
  gluten peptide
MENSHIPGLERLSQQQPLPP

SEQ ID NO: 1052 - protein, 20 aa, Artificial Sequence
  gluten peptide
MENSHIPGLEGPSQQQPLPP

SEQ ID NO: 1053 - protein, 20 aa, Artificial Sequence
  gluten peptide
KVFLQQQCSPVAIPYRLARS

SEQ ID NO: 1054 - protein, 20 aa, Artificial Sequence
  gluten peptide
QPPFSQQQQTPFSQQQQIPV

SEQ ID NO: 1055 - protein, 20 aa, Artificial Sequence
  gluten peptide
SQQQQPPFSQQQQIPVIHPS

SEQ ID NO: 1056 - protein, 20 aa, Artificial Sequence
  gluten peptide
QQQQTPFSQQQQIPVIHPSV

SEQ ID NO: 1057 - protein, 20 aa, Artificial Sequence
  gluten peptide
ETRCIPGLERPWQQQPLPPQ

SEQ ID NO: 1058 - protein, 20 aa, Artificial Sequence
  gluten peptide
METRCIPGLERPWQQQPLPP

SEQ ID NO: 1059 - protein, 20 aa, Artificial Sequence
  gluten peptide
METSHIPSLEKPLQQQPLPL

SEQ ID NO: 1060 - protein, 20 aa, Artificial Sequence
  gluten peptide
CASHIPSLEKPLQQQPLPLQ

SEQ ID NO: 1061 - protein, 20 aa, Artificial Sequence
  gluten peptide
QQPFPQPQQAQLPFPQQPQQ

SEQ ID NO: 1062 - protein, 20 aa, Artificial Sequence
  gluten peptide
PQQAQLPFPQQPQQPLPQPQ

SEQ ID NO: 1063 - protein, 20 aa, Artificial Sequence
  gluten peptide
QAQLPFPQQPQQPLPQPQQP

SEQ ID NO: 1064 - protein, 20 aa, Artificial Sequence
  gluten peptide
QQPFPQPQQAQLPFPQQPQQ

SEQ ID NO: 1065 - protein, 20 aa, Artificial Sequence
  gluten peptide
QPFPQPQQAQLPFPQQPQQP

SEQ ID NO: 1066 - protein, 20 aa, Artificial Sequence
  gluten peptide
QQPAQYEVIRSLVLRTLPNM

SEQ ID NO: 1067 - protein, 20 aa, Artificial Sequence
  gluten peptide
QYEVIRSLVLRTLPNMCNVY

SEQ ID NO: 1068 - protein, 20 aa, Artificial Sequence
  gluten peptide
QYEVIRSLVLRTLPNMCNVY

SEQ ID NO: 1069 - protein, 20 aa, Artificial Sequence
  gluten peptide
QPQQPAQLEGIRSLVLKTLP

SEQ ID NO: 1070 - protein, 20 aa, Artificial Sequence
  gluten peptide
IIQPQQPAQLEGIRSLVLKT

SEQ ID NO: 1071 - protein, 20 aa, Artificial Sequence
  gluten peptide
QLAQGLGIIQPQQPAQLEGI

SEQ ID NO: 1072 - protein, 20 aa, Artificial Sequence
  gluten peptide
QPQQPAQLEGIRSLVLKTLP

SEQ ID NO: 1073 - protein, 20 aa, Artificial Sequence
  gluten peptide
IIQPQQPAQLEGIRSLVLKT

SEQ ID NO: 1074 - protein, 20 aa, Artificial Sequence
  gluten peptide
CKVFLQQQCSPVAMPQRLAR

SEQ ID NO: 1075 - protein, 16 aa, Artificial Sequence
  gluten peptide
LQQQCSPVAMPQRLAR

SEQ ID NO: 1076 - protein, 20 aa, Artificial Sequence
  gluten peptide
VFLQQCSPVAMPQRLARSQM

SEQ ID NO: 1077 - protein, 20 aa, Artificial Sequence
  gluten peptide
QQQCSPVAMPQRLARSQMWQ

SEQ ID NO: 1078 - protein, 20 aa, Artificial Sequence
  gluten peptide
CSPVAMPQRLARSQMWQQSS

SEQ ID NO: 1079 - protein, 20 aa, Artificial Sequence
  gluten peptide
QCSPVAMPQHLARSQMWQQS

SEQ ID NO: 1080 - protein, 20 aa, Artificial Sequence
  gluten peptide
CKVFLQQQCSPVAMPQRLAR

SEQ ID NO: 1081 - protein, 20 aa, Artificial Sequence
  gluten peptide
QQQCSPVAMPQRLARSQMWQ

SEQ ID NO: 1082 - protein, 20 aa, Artificial Sequence
  gluten peptide
VFLQQQCSPVAMPQHLARSQ

SEQ ID NO: 1083 - protein, 20 aa, Artificial Sequence
  gluten peptide
VFLQQQCSPVAMPQRLARSQ

SEQ ID NO: 1084 - protein, 20 aa, Artificial Sequence
  gluten peptide
SPVAMPQRLARSQMLQQSSC

SEQ ID NO: 1085 - protein, 20 aa, Artificial Sequence
  gluten peptide
QQLNPCKNFLLQQCKPVSLV

SEQ ID NO: 1086 - protein, 20 aa, Artificial Sequence
  gluten peptide
SLIQQSLQQQLNPCKNFLLQ

SEQ ID NO: 1087 - protein, 20 aa, Artificial Sequence
  gluten peptide
QPSLQQQVNPCKNFLLQQCK

SEQ ID NO: 1088 - protein, 20 aa, Artificial Sequence
  gluten peptide
IQQSLQQQLNPCKNFLLQQC

SEQ ID NO: 1089 - protein, 20 aa, Artificial Sequence
  gluten peptide
IQPSLQQQVNPCKNFLLQQC

SEQ ID NO: 1090 - protein, 20 aa, Artificial Sequence
  gluten peptide
LQQQVNPCKNFLLQQCKLVS

SEQ ID NO: 1091 - protein, 20 aa, Artificial Sequence
  gluten peptide
QGTFLQPQQVAQLELMTSIA

SEQ ID NO: 1092 - protein, 20 aa, Artificial Sequence
  gluten peptide
QQPQFSQQQQIPVIHPSVLQ

SEQ ID NO: 1093 - protein, 20 aa, Artificial Sequence
  gluten peptide
QPPFSQQQQPQFSQQQQIPV

SEQ ID NO: 1094 - protein, 20 aa, Artificial Sequence
  gluten peptide
LQLQPFPQPQPFPPQLPYPQ

SEQ ID NO: 1095 - protein, 20 aa, Artificial Sequence
  gluten peptide
QPFPSQQPYPQPQPFPPQLP

SEQ ID NO: 1096 - protein, 20 aa, Artificial Sequence
  gluten peptide
PYPQPQPFPQPQPFPPQLPY

SEQ ID NO: 1097 - protein, 20 aa, Artificial Sequence
  gluten peptide
LQLQPFPQPQPFPPQLPYPQ

SEQ ID NO: 1098 - protein, 20 aa, Artificial Sequence
  gluten peptide
MQLQPFPQPQPFPPQLPYPQ

SEQ ID NO: 1099 - protein, 20 aa, Artificial Sequence
  gluten peptide
QQPFPSQQPYPQPQPFPPQL

SEQ ID NO: 1100 - protein, 20 aa, Artificial Sequence
  gluten peptide
PFPQPQPFPPQLPYPQPPPF

SEQ ID NO: 1101 - protein, 20 aa, Artificial Sequence
  gluten peptide
PFPQPQPFPPQLPYPQPQSF

SEQ ID NO: 1102 - protein, 20 aa, Artificial Sequence
  gluten peptide
PQPQPFPQPQPFPPQLPYPQ

SEQ ID NO: 1103 - protein, 20 aa, Artificial Sequence
  gluten peptide
SQQPYLQLQPFPQPQPFPPQ

SEQ ID NO: 1104 - protein, 20 aa, Artificial Sequence
  gluten peptide
PFPSQQPYPQPQPFPPQLPY

SEQ ID NO: 1105 - protein, 16 aa, Artificial Sequence
  gluten peptide
GQQPFPQPEQPFCQQG

SEQ ID NO: 1106 - protein, 20 aa, Artificial Sequence
  gluten peptide
GQVQWPQQQPFPQPQQPFCE

SEQ ID NO: 1107 - protein, 20 aa, Artificial Sequence
  gluten peptide
WPQQQPFPQPQQPFCQQPQQ

SEQ ID NO: 1108 - protein, 16 aa, Artificial Sequence
  gluten peptide
GQQPFPQPQQPFCQQG

SEQ ID NO: 1109 - protein, 20 aa, Artificial Sequence
  gluten peptide
PQQQPFPQPQQPFCEQPQRT

SEQ ID NO: 1110 - protein, 20 aa, Artificial Sequence
  gluten peptide
QQQPFPQPQQPFCQQPQRTI

SEQ ID NO: 1111 - protein, 20 aa, Artificial Sequence
  gluten peptide
FPQPQQPFCQQPQRTIPQPH

SEQ ID NO: 1112 - protein, 20 aa, Artificial Sequence
  gluten peptide
QQQPFPQPQQPFCEQPQRTI

SEQ ID NO: 1113 - protein, 20 aa, Artificial Sequence
  gluten peptide
CCQQLPQIPEQSRYEAIRAI

SEQ ID NO: 1114 - protein, 20 aa, Artificial Sequence
  gluten peptide
SSCHVMQQQCCQQLPQIPQQ

SEQ ID NO: 1115 - protein, 20 aa, Artificial Sequence
  gluten peptide
QCCQQLPQIPQQSRYQAIRA

SEQ ID NO: 1116 - protein, 20 aa, Artificial Sequence
  gluten peptide
QQCCQQLPQIPQQSRYEAIR

SEQ ID NO: 1117 - protein, 20 aa, Artificial Sequence
  gluten peptide
QCCQQLPQIPEQSRSEAIRA

SEQ ID NO: 1118 - protein, 20 aa, Artificial Sequence
  gluten peptide
QCCQQLPQIPQQSRYQAIRA

SEQ ID NO: 1119 - protein, 20 aa, Artificial Sequence
  gluten peptide
HVMQQQCCQQLPQIPQQSRY

SEQ ID NO: 1120 - protein, 20 aa, Artificial Sequence
  gluten peptide
QQCCQQLPQIPEQSRYDAIR

SEQ ID NO: 1121 - protein, 20 aa, Artificial Sequence
  gluten peptide
QCCQQLPQIPEQSRYDVIRA

SEQ ID NO: 1122 - protein, 20 aa, Artificial Sequence
  gluten peptide
CQQLPQIPQQSRYEAIRAII

SEQ ID NO: 1123 - protein, 20 aa, Artificial Sequence
  gluten peptide
FPQPQLPFPQQSEQIIPQQL

SEQ ID NO: 1124 - protein, 20 aa, Artificial Sequence
  gluten peptide
PQQSEQIIPQQLQQPFPLQP

SEQ ID NO: 1125 - protein, 20 aa, Artificial Sequence
  gluten peptide
PQQSEQIIPQQLQQPFPLQP

SEQ ID NO: 1126 - protein, 20 aa, Artificial Sequence
  gluten peptide
FPQPQLPFPQQSEQIIPQQL

SEQ ID NO: 1127 - protein, 20 aa, Artificial Sequence
  gluten peptide
PLNNNNSPNNNSPSNHHNNS

SEQ ID NO: 1128 - protein, 20 aa, Artificial Sequence
  gluten peptide
NNSPNNNSPSNHHNNSPNNN

SEQ ID NO: 1129 - protein, 20 aa, Artificial Sequence
  gluten peptide
PLNNNNSPNNNSPSNHHNNS

SEQ ID NO: 1130 - protein, 20 aa, Artificial Sequence
  gluten peptide
NNNSPNNNSPSNHHNNSPNN

SEQ ID NO: 1131 - protein, 20 aa, Artificial Sequence
  gluten peptide
NNSPNNNSPSNHHNNSPNNN

SEQ ID NO: 1132 - protein, 16 aa, Artificial Sequence
  gluten peptide
IIMQQEQQEQRQGVQI

SEQ ID NO: 1133 - protein, 20 aa, Artificial Sequence
  gluten peptide
IVHSIIMQQEQQEQRQGVQI

SEQ ID NO: 1134 - protein, 16 aa, Artificial Sequence
  gluten peptide
IVHSIIMQQEQQEQRQ

SEQ ID NO: 1135 - protein, 20 aa, Artificial Sequence
  gluten peptide
SIVHSIIMQQEQQEQRQGVQ

SEQ ID NO: 1136 - protein, 20 aa, Artificial Sequence
  gluten peptide
IVHSIIMQQEQQEQRQGVQI

SEQ ID NO: 1137 - protein, 20 aa, Artificial Sequence
  gluten peptide
QQMNPCKNFLLQQCNHVSLV

SEQ ID NO: 1138 - protein, 20 aa, Artificial Sequence
  gluten peptide
IQSFLQQQMNPCKNFLLQQC

SEQ ID NO: 1139 - protein, 20 aa, Artificial Sequence
  gluten peptide
QSFLQQQMNPCKNFLLQQCN

SEQ ID NO: 1140 - protein, 20 aa, Artificial Sequence
  gluten peptide
IQPYLQQQMNPCKNYLLQQC

SEQ ID NO: 1141 - protein, 20 aa, Artificial Sequence
  gluten peptide
IQPYLQQQMNPCKNYLLQQC

SEQ ID NO: 1142 - protein, 20 aa, Artificial Sequence
  gluten peptide
LQQQMNPCKNYLLQQCNPVS

SEQ ID NO: 1143 - protein, 20 aa, Artificial Sequence
  gluten peptide
TMCNVNVPLYRTTTRVPFGV

SEQ ID NO: 1144 - protein, 20 aa, Artificial Sequence
  gluten peptide
TSFALRTLPTMCNVNVPLYR

SEQ ID NO: 1145 - protein, 20 aa, Artificial Sequence
  gluten peptide
CNHVSLVSSLVSIILPRSDC

SEQ ID NO: 1146 - protein, 20 aa, Artificial Sequence
  gluten peptide
HVSLVSSLVSIILPRSDCQV

SEQ ID NO: 1147 - protein, 20 aa, Artificial Sequence
  gluten peptide
LVSSLVSIILPRSDCQVMQQ

SEQ ID NO: 1148 - protein, 20 aa, Artificial Sequence
  gluten peptide
SCHVMQQQCCQQLAQIPEQS

SEQ ID NO: 1149 - protein, 20 aa, Artificial Sequence
  gluten peptide
QCCQQLAQIPEQSRHEAIRA

SEQ ID NO: 1150 - protein, 20 aa, Artificial Sequence
  gluten peptide
MESNIIISFLKPWLQQPLPP

SEQ ID NO: 1151 - protein, 20 aa, Artificial Sequence
  gluten peptide
SNIIISFLKPWLQQPLPPQQ

SEQ ID NO: 1152 - protein, 20 aa, Artificial Sequence
  gluten peptide
QQPFPQPQQPQLPFPQQPQQ

SEQ ID NO: 1153 - protein, 20 aa, Artificial Sequence
  gluten peptide
PQQPFPQPQQPQQPFPQPQQ

SEQ ID NO: 1154 - protein, 20 aa, Artificial Sequence
  gluten peptide
QLPFPQQPQQPFPQPQQPQQ

SEQ ID NO: 1155 - protein, 20 aa, Artificial Sequence
  gluten peptide
QPQQPQQPFPQPQQPQLPFP

SEQ ID NO: 1156 - protein, 20 aa, Artificial Sequence
  gluten peptide
QQPQQPFPQPQQPQLPFPQQ

SEQ ID NO: 1157 - protein, 20 aa, Artificial Sequence
  gluten peptide
SQQPQQPFPQPQQPQQSFPQ

SEQ ID NO: 1158 - protein, 20 aa, Artificial Sequence
  gluten peptide
QQQQPFPQPQQPQQPFPQPQ

SEQ ID NO: 1159 - protein, 20 aa, Artificial Sequence
  gluten peptide
QQPQQPFPQPQQPQLPFPQQ

SEQ ID NO: 1160 - protein, 20 aa, Artificial Sequence
  gluten peptide
PQQPFPQPQQPQLPFPQQPQ

SEQ ID NO: 1161 - protein, 20 aa, Artificial Sequence
  gluten peptide
SKQPQQPFPQPQQPQQSFPQ

SEQ ID NO: 1162 - protein, 20 aa, Artificial Sequence
  gluten peptide
QSKQPQQPFPQPQQPQQSFP

SEQ ID NO: 1163 - protein, 16 aa, Artificial Sequence
  gluten peptide
GQQPFPQPEQPQLPFG

SEQ ID NO: 1164 - protein, 20 aa, Artificial Sequence
  gluten peptide
QQPFPQPQQPQLPFPQQPQQ

SEQ ID NO: 1165 - protein, 16 aa, Artificial Sequence
  gluten peptide
GQQPFPQPEQPQQPFG

SEQ ID NO: 1166 - protein, 16 aa, Artificial Sequence
  gluten peptide
GQQPFPQPQQPQLPFG

SEQ ID NO: 1167 - protein, 20 aa, Artificial Sequence
  gluten peptide
QQPFPQPQQPQQPFPQLQQP

SEQ ID NO: 1168 - protein, 16 aa, Artificial Sequence
  gluten peptide
GQQPFPQPEQPQQSFG

SEQ ID NO: 1169 - protein, 20 aa, Artificial Sequence
  gluten peptide
GQVQWPQQQQPFPQPQQPQQ

SEQ ID NO: 1170 - protein, 20 aa, Artificial Sequence
  gluten peptide
PQQPFPQPQQPQQPFPQLQQ

SEQ ID NO: 1171 - protein, 16 aa, Artificial Sequence
  gluten peptide
GQQPFPQPQQPQQPFG

SEQ ID NO: 1172 - protein, 16 aa, Artificial Sequence
  gluten peptide
GQQPFPQPQQPQQSFG

SEQ ID NO: 1173 - protein, 20 aa, Artificial Sequence
  gluten peptide
QQPFPQPQQPQQPFPQSQQP

SEQ ID NO: 1174 - protein, 20 aa, Artificial Sequence
  gluten peptide
PFPQPQQPQQSFPQQQQPLI

SEQ ID NO: 1175 - protein, 20 aa, Artificial Sequence
  gluten peptide
PQQPFPQPQQPQQPFPQPQQ

SEQ ID NO: 1176 - protein, 20 aa, Artificial Sequence
  gluten peptide
QLPFPQQPQQPFPQPQQPQQ

SEQ ID NO: 1177 - protein, 20 aa, Artificial Sequence
  gluten peptide
PQQQFPQPQQPQQPFPQQPQ

SEQ ID NO: 1178 - protein, 20 aa, Artificial Sequence
  gluten peptide
QPFPQPQQQFPQPQQPQQSF

SEQ ID NO: 1179 - protein, 20 aa, Artificial Sequence
  gluten peptide
SQQPQQPFPQPQQPQQSFPQ

SEQ ID NO: 1180 - protein, 20 aa, Artificial Sequence
  gluten peptide
QQQQPFPQPQQPQQPFPQPQ

SEQ ID NO: 1181 - protein, 20 aa, Artificial Sequence
  gluten peptide
SKQPQQPFPQPQQPQQSFPQ

SEQ ID NO: 1182 - protein, 20 aa, Artificial Sequence
  gluten peptide
QQFPQPQQPQQQFLQPQQPF

SEQ ID NO: 1183 - protein, 20 aa, Artificial Sequence
  gluten peptide
QSKQPQQPFPQPQQPQQSFP

SEQ ID NO: 1184 - protein, 20 aa, Artificial Sequence
  gluten peptide
QQFPQPQQPQQPFPQQPQQQ

SEQ ID NO: 1185 - protein, 16 aa, Artificial Sequence
  gluten peptide
GQQPFPQPEQPQQPFG

SEQ ID NO: 1186 - protein, 16 aa, Artificial Sequence
  gluten peptide
GFPQPQQPEQSFPQQG

SEQ ID NO: 1187 - protein, 20 aa, Artificial Sequence
  gluten peptide
QQPQQQFPQPQQPQQPFPQP

SEQ ID NO: 1188 - protein, 16 aa, Artificial Sequence
  gluten peptide
GFPQPQQPEQPFPQQG

SEQ ID NO: 1189 - protein, 20 aa, Artificial Sequence
  gluten peptide
PQPQQQFPQPQQPQQSFPQQ

SEQ ID NO: 1190 - protein, 16 aa, Artificial Sequence
  gluten peptide
GQQQFPQPEQPQQSFG

SEQ ID NO: 1191 - protein, 16 aa, Artificial Sequence
  gluten peptide
GFPQPQQPQQPFPQQG

SEQ ID NO: 1192 - protein, 20 aa, Artificial Sequence
  gluten peptide
FPQPQQPQQQFLQPRQPFPQ

SEQ ID NO: 1193 - protein, 20 aa, Artificial Sequence
  gluten peptide
QQPFPQPQQPQQPFPQLQQP

SEQ ID NO: 1194 - protein, 20 aa, Artificial Sequence
  gluten peptide
PQQQFPQPQQPQQPFPQQPQ

SEQ ID NO: 1195 - protein, 16 aa, Artificial Sequence
  gluten peptide
GQQPFPQPEQPQQSFG

SEQ ID NO: 1196 - protein, 20 aa, Artificial Sequence
  gluten peptide
GQVQWPQQQQPFPQPQQPQQ

SEQ ID NO: 1197 - protein, 20 aa, Artificial Sequence
  gluten peptide
PQQPFPQPQQPQQPFPQLQQ

SEQ ID NO: 1198 - protein, 16 aa, Artificial Sequence
  gluten peptide
GQQPFPQPQQPQQPFG

SEQ ID NO: 1199 - protein, 16 aa, Artificial Sequence
  gluten peptide
GQQPFPQPQQPQQSFG

SEQ ID NO: 1200 - protein, 20 aa, Artificial Sequence
  gluten peptide
QQPFPQPQQPQQPFPQSQQP

SEQ ID NO: 1201 - protein, 16 aa, Artificial Sequence
  gluten peptide
GFPQPQQPQQSFPQQG

SEQ ID NO: 1202 - protein, 20 aa, Artificial Sequence
  gluten peptide
PFPQPQQPQQSFPQQQQPLI

SEQ ID NO: 1203 - protein, 16 aa, Artificial Sequence
  gluten peptide
GQQQFPQPQQPQQSFG

SEQ ID NO: 1204 - protein, 16 aa, Artificial Sequence
  gluten peptide
GQQQFPQPQQPQQPFG

SEQ ID NO: 1205 - protein, 20 aa, Artificial Sequence
  gluten peptide
TFPHQPQQQFPQPQQPQQPF

SEQ ID NO: 1206 - protein, 20 aa, Artificial Sequence
  gluten peptide
QTFPHQPQQQFPQPQQPQQQ

SEQ ID NO: 1207 - protein, 20 aa, Artificial Sequence
  gluten peptide
SQPQQQFPQPQQPQQSFPQQ

SEQ ID NO: 1208 - protein, 20 aa, Artificial Sequence
  gluten peptide
QTCPHQPQQQFPQPQQPQQP

SEQ ID NO: 1209 - protein, 16 aa, Artificial Sequence
  gluten peptide
GQQQFPQPEQPQQPFG

SEQ ID NO: 1210 - protein, 20 aa, Artificial Sequence
  gluten peptide
QQFPQPQQPQQQFLQPRQPF

SEQ ID NO: 1211 - protein, 20 aa, Artificial Sequence
  gluten peptide
QQFPQPQQPQQQFLQPQQPF

SEQ ID NO: 1212 - protein, 20 aa, Artificial Sequence
  gluten peptide
LQQSSYQQLQQLCCQQLFQI

SEQ ID NO: 1213 - protein, 20 aa, Artificial Sequence
  gluten peptide
QSSYQQLQQLCCQQLFQIPE

SEQ ID NO: 1214 - protein, 20 aa, Artificial Sequence
  gluten peptide
PQQSFPQQSQQSQQPFAQPQ

SEQ ID NO: 1215 - protein, 20 aa, Artificial Sequence
  gluten peptide
PQPQQPIPVQPQQSFPQQSQ

SEQ ID NO: 1216 - protein, 20 aa, Artificial Sequence
  gluten peptide
QPQQPIPVQPQQSFPQQSQQ

SEQ ID NO: 1217 - protein, 20 aa, Artificial Sequence
  gluten peptide
VQPQQSFPQQSQQSQQPFAQ

SEQ ID NO: 1218 - protein, 20 aa, Artificial Sequence
  gluten peptide
RPQQLYPQPQPQYSQPQQPI

SEQ ID NO: 1219 - protein, 20 aa, Artificial Sequence
  gluten peptide
QPFRPQQLYPQPQPQYSQPQ

SEQ ID NO: 1220 - protein, 20 aa, Artificial Sequence
  gluten peptide
QQPFPQQPQQPFPQPQQPIP

SEQ ID NO: 1221 - protein, 20 aa, Artificial Sequence
  gluten peptide
QQFLQPQQPFPQQPQQPYPQ

SEQ ID NO: 1222 - protein, 20 aa, Artificial Sequence
  gluten peptide
PLQPQQPFPQQPQQPFPQPQ

SEQ ID NO: 1223 - protein, 20 aa, Artificial Sequence
  gluten peptide
PQQQFIQPQQPFPQQPQQTY

SEQ ID NO: 1224 - protein, 20 aa, Artificial Sequence
  gluten peptide
PQQPFPQQPQQQFPQPQQPQ

SEQ ID NO: 1225 - protein, 20 aa, Artificial Sequence
  gluten peptide
PQQQFPQPQQPQQPFPQQPQ

SEQ ID NO: 1226 - protein, 20 aa, Artificial Sequence
  gluten peptide
TQQPQQPFPQQPQQPFPQTQ

SEQ ID NO: 1227 - protein, 20 aa, Artificial Sequence
  gluten peptide
PQQPFPQQPQQPQQPFPQPQ

SEQ ID NO: 1228 - protein, 20 aa, Artificial Sequence
  gluten peptide
QQPFPQTQQPQQPFPQQPQQ

SEQ ID NO: 1229 - protein, 20 aa, Artificial Sequence
  gluten peptide
QTQQPQQPFPQQPQQPFPQT

SEQ ID NO: 1230 - protein, 20 aa, Artificial Sequence
  gluten peptide
QQPQQPFPQQPQQQFPQPQQ

SEQ ID NO: 1231 - protein, 20 aa, Artificial Sequence
  gluten peptide
QQPFPQQPQQPFPQTQQPQQ

SEQ ID NO: 1232 - protein, 20 aa, Artificial Sequence
  gluten peptide
TPIQPQQPFPQQPQQPQQPF

SEQ ID NO: 1233 - protein, 20 aa, Artificial Sequence
  gluten peptide
QQPYPQQPQQPFPQTQQPQQ

SEQ ID NO: 1234 - protein, 20 aa, Artificial Sequence
  gluten peptide
QQQFIQPQQPFPQQPQQTYP

SEQ ID NO: 1235 - protein, 20 aa, Artificial Sequence
  gluten peptide
PIQPQQPFPQQPQQPQQPFP

SEQ ID NO: 1236 - protein, 20 aa, Artificial Sequence
  gluten peptide
PQQQFIQPQQPFPQQPQQTY

SEQ ID NO: 1237 - protein, 20 aa, Artificial Sequence
  gluten peptide
QQFPQPQQPQQPFPQQPQQQ

SEQ ID NO: 1238 - protein, 20 aa, Artificial Sequence
  gluten peptide
FPLQPQQPFPQQPQQPFPQP

SEQ ID NO: 1239 - protein, 20 aa, Artificial Sequence
  gluten peptide
PQQPFLQPQQPFPQQPQQPF

SEQ ID NO: 1240 - protein, 20 aa, Artificial Sequence
  gluten peptide
PLQPQQPFPQQPQQPFPQQP

SEQ ID NO: 1241 - protein, 16 aa, Artificial Sequence
  gluten peptide
GQPQQPFPEQPQQPFG

SEQ ID NO: 1242 - protein, 20 aa, Artificial Sequence
  gluten peptide
YPQQPFPQQPQQPFPQQPPF

SEQ ID NO: 1243 - protein, 20 aa, Artificial Sequence
  gluten peptide
PQQPQQPFPQQPQQSFPQQP

SEQ ID NO: 1244 - protein, 20 aa, Artificial Sequence
  gluten peptide
PQQPFPQQPQQQFPQPQQPQ

SEQ ID NO: 1245 - protein, 20 aa, Artificial Sequence
  gluten peptide
QQPFPQQPQQPSSQQPPFPQ

SEQ ID NO: 1246 - protein, 20 aa, Artificial Sequence
  gluten peptide
PQQQFLQPQQPFPQQPQQPY

SEQ ID NO: 1247 - protein, 20 aa, Artificial Sequence
  gluten peptide
PLQPQQPFPQQPQQPFPQPQ

SEQ ID NO: 1248 - protein, 20 aa, Artificial Sequence
  gluten peptide
PQQQFPQPQQPQQPFPQQPQ

SEQ ID NO: 1249 - protein, 16 aa, Artificial Sequence
  gluten peptide
GQPQQPFPQQPQQPFG

SEQ ID NO: 1250 - protein, 20 aa, Artificial Sequence
  gluten peptide
RQPFPQQPQQPYPQQPQQPF

SEQ ID NO: 1251 - protein, 16 aa, Artificial Sequence
  gluten peptide
GQPQQPFPEQPQQSFG

SEQ ID NO: 1252 - protein, 16 aa, Artificial Sequence
  gluten peptide
GQPQQPFPQQPQQSFG

SEQ ID NO: 1253 - protein, 20 aa, Artificial Sequence
  gluten peptide
PQQPFPQQPQQSFPQQPQQP

SEQ ID NO: 1254 - protein, 20 aa, Artificial Sequence
  gluten peptide
QQPFPQQPQQPYPQQPQQPF

SEQ ID NO: 1255 - protein, 20 aa, Artificial Sequence
  gluten peptide
QPQQPFPQQPQQPFPQTQQP

SEQ ID NO: 1256 - protein, 20 aa, Artificial Sequence
  gluten peptide
QQPFPQTQQPQQPFPQQPQQ

SEQ ID NO: 1257 - protein, 20 aa, Artificial Sequence
  gluten peptide
FPQQPQQPYPQQPQQPFPQT

SEQ ID NO: 1258 - protein, 20 aa, Artificial Sequence
  gluten peptide
PQQPFPQQPQQTYPQRPQQP

SEQ ID NO: 1259 - protein, 20 aa, Artificial Sequence
  gluten peptide
QQPQQPFPQQPQQQFPQPQQ

SEQ ID NO: 1260 - protein, 15 aa, Artificial Sequence
  gluten peptide
PFPEQPEQPYPQQPQ

SEQ ID NO: 1261 - protein, 16 aa, Artificial Sequence
  gluten peptide
GQPQQPFPEQPQQTFG

SEQ ID NO: 1262 - protein, 20 aa, Artificial Sequence
  gluten peptide
PFPQQPQQPFPQQPQQSFPQ

SEQ ID NO: 1263 - protein, 16 aa, Artificial Sequence
  gluten peptide
GQPQQPFPQQPQQTFG

SEQ ID NO: 1264 - protein, 20 aa, Artificial Sequence
  gluten peptide
YAQPYLPYPQQPFPQQPQQP

SEQ ID NO: 1265 - protein, 20 aa, Artificial Sequence
  gluten peptide
PQQPQQPFPQQPQQQFPQPQ

SEQ ID NO: 1266 - protein, 16 aa, Artificial Sequence
  gluten peptide
GQPQQPFPEQPQQQFG

SEQ ID NO: 1267 - protein, 20 aa, Artificial Sequence
  gluten peptide
PQQPQQPYPQQPQQLFPQTQ

SEQ ID NO: 1268 - protein, 16 aa, Artificial Sequence
  gluten peptide
GQPQQPFPQQPQQQFG

SEQ ID NO: 1269 - protein, 20 aa, Artificial Sequence
  gluten peptide
QQPFPQQPQQTYPQRPQQPF

SEQ ID NO: 1270 - protein, 20 aa, Artificial Sequence
  gluten peptide
QQPFPQQPQQTYPQRPQQPF

SEQ ID NO: 1271 - protein, 20 aa, Artificial Sequence
  gluten peptide
LQPQQPFPQQPQQPYPQQPQ

SEQ ID NO: 1272 - protein, 20 aa, Artificial Sequence
  gluten peptide
PRQPFPQQPQQPYPQQPQQP

SEQ ID NO: 1273 - protein, 20 aa, Artificial Sequence
  gluten peptide
QGTFLQPQQVAQLELMTSIA

SEQ ID NO: 1274 - protein, 20 aa, Artificial Sequence
  gluten peptide
QPQQQQLAHQIAQLEVMTSI

SEQ ID NO: 1275 - protein, 20 aa, Artificial Sequence
  gluten peptide
QPHQIAQLEVMTSIALRILP

SEQ ID NO: 1276 - protein, 20 aa, Artificial Sequence
  gluten peptide
PHQIAQLEVMTSFALRTLPT

SEQ ID NO: 1277 - protein, 20 aa, Artificial Sequence
  gluten peptide
HQIAQLEVMTSIALRILPTM

SEQ ID NO: 1278 - protein, 20 aa, Artificial Sequence
  gluten peptide
GTLLQPHQIAQLEVMTSIAL

SEQ ID NO: 1279 - protein, 20 aa, Artificial Sequence
  gluten peptide
QIAQLEVMTSFALRTLPTMC

SEQ ID NO: 1280 - protein, 20 aa, Artificial Sequence
  gluten peptide
TLLQPHQIAQLELMTSIALR

SEQ ID NO: 1281 - protein, 20 aa, Artificial Sequence
  gluten peptide
FLQPHQIAQLEVMTSIAPRT

SEQ ID NO: 1282 - protein, 20 aa, Artificial Sequence
  gluten peptide
QGTFLQPHQIAQLEVMTSIA

SEQ ID NO: 1283 - protein, 20 aa, Artificial Sequence
  gluten peptide
QIAQLEVMTSIALRILPTMC

SEQ ID NO: 1284 - protein, 20 aa, Artificial Sequence
  gluten peptide
ELCCQHLWQIPEQSQCQAIH

SEQ ID NO: 1285 - protein, 20 aa, Artificial Sequence
  gluten peptide
HLWQIPEQSQCQAIQNVVHA

SEQ ID NO: 1286 - protein, 20 aa, Artificial Sequence
  gluten peptide
QHLWQIPEQSQCQAIHKVVH

SEQ ID NO: 1287 - protein, 20 aa, Artificial Sequence
  gluten peptide
ELCCQHLWQIPEQSQCQAIH

SEQ ID NO: 1288 - protein, 20 aa, Artificial Sequence
  gluten peptide
QSGQGLSQSQQQSQQQLGQC

SEQ ID NO: 1289 - protein, 20 aa, Artificial Sequence
  gluten peptide
QSDQGVSQSQQQSQQQLGQC

SEQ ID NO: 1290 - protein, 20 aa, Artificial Sequence
  gluten peptide
QGVSQSQQQSQQQLGQCSFQ

SEQ ID NO: 1291 - protein, 20 aa, Artificial Sequence
  gluten peptide
FILSVSQPQQQQSQQQLGQQ

SEQ ID NO: 1292 - protein, 20 aa, Artificial Sequence
  gluten peptide
QCVSQPQQQSQQQLGQQPQQ

SEQ ID NO: 1293 - protein, 20 aa, Artificial Sequence
  gluten peptide
QQSGQGVSQSQQQSQQQLGQ

SEQ ID NO: 1294 - protein, 20 aa, Artificial Sequence
  gluten peptide
CVSQPQQQSQQQLGQQPQQQ

SEQ ID NO: 1295 - protein, 20 aa, Artificial Sequence
  gluten peptide
YQPQQQSQQQLGQCSFQQPQ

SEQ ID NO: 1296 - protein, 20 aa, Artificial Sequence
  gluten peptide
QSQQQSQQQLGQCSFQQPQQ

SEQ ID NO: 1297 - protein, 20 aa, Artificial Sequence
  gluten peptide
QPQQQQSQQQLGQQPQQQQQ

SEQ ID NO: 1298 - protein, 20 aa, Artificial Sequence
  gluten peptide
QLGQCVSQPQQQSQQQLGQQ

SEQ ID NO: 1299 - protein, 20 aa, Artificial Sequence
  gluten peptide
QLGQCVSQPQQQSQQQLGQQ

SEQ ID NO: 1300 - protein, 20 aa, Artificial Sequence
  gluten peptide
ISIVQPSILQQLNPCKVFLQ

SEQ ID NO: 1301 - protein, 20 aa, Artificial Sequence
  gluten peptide
PQQQISIVQPSVLQQLNPCK

SEQ ID NO: 1302 - protein, 20 aa, Artificial Sequence
  gluten peptide
QQQLPQQQISIVQPSILQQL

SEQ ID NO: 1303 - protein, 20 aa, Artificial Sequence
  gluten peptide
PLYSATTSVRFGVGTGVGAY

SEQ ID NO: 1304 - protein, 20 aa, Artificial Sequence
  gluten peptide
VPLYSATTSVRFGVGTGVGA

SEQ ID NO: 1305 - protein, 20 aa, Artificial Sequence
  gluten peptide
AIIMHQQEQQQQLQQQQQQQ

SEQ ID NO: 1306 - protein, 16 aa, Artificial Sequence
  gluten peptide
GQMHQQEQQQQLQQQG

SEQ ID NO: 1307 - protein, 20 aa, Artificial Sequence
  gluten peptide
HQQEQQQQLQQQQQQQLQQQ

SEQ ID NO: 1308 - protein, 20 aa, Artificial Sequence
  gluten peptide
IIMHQQEQQQQLQQQQQQQL

SEQ ID NO: 1309 - protein, 16 aa, Artificial Sequence
  gluten peptide
GQMHQQEQEQQLQQQG

SEQ ID NO: 1310 - protein, 20 aa, Artificial Sequence
  gluten peptide
LQQILQQQLTPCMDVVLQQH

SEQ ID NO: 1311 - protein, 20 aa, Artificial Sequence
  gluten peptide
QQQQEQQILQQILQQQLTPC

SEQ ID NO: 1312 - protein, 20 aa, Artificial Sequence
  gluten peptide
ILQQILQQQLTPCMDVVLQQ

SEQ ID NO: 1313 - protein, 20 aa, Artificial Sequence
  gluten peptide
QQVLPQQQIPFVHPSILQQL

SEQ ID NO: 1314 - protein, 20 aa, Artificial Sequence
  gluten peptide
QLPPFSQQQQQVLPQQQIPF

SEQ ID NO: 1315 - protein, 20 aa, Artificial Sequence
  gluten peptide
FSQQQQPQFSQQQQPFPQQQ

SEQ ID NO: 1316 - protein, 20 aa, Artificial Sequence
  gluten peptide
FSQQQQPQFSQQQQPFPQQQ

SEQ ID NO: 1317 - protein, 20 aa, Artificial Sequence
  gluten peptide
PPFSQQQQPQFSQQQQPFPQ

SEQ ID NO: 1318 - protein, 20 aa, Artificial Sequence
  gluten peptide
METSCIPGLERPWQQQPLQQ

SEQ ID NO: 1319 - protein, 20 aa, Artificial Sequence
  gluten peptide
ETRCIPGLERPWQQQPLPPQ

SEQ ID NO: 1320 - protein, 20 aa, Artificial Sequence
  gluten peptide
MRCIPGLERPWQQQPLPPQQ

SEQ ID NO: 1321 - protein, 20 aa, Artificial Sequence
  gluten peptide
METRCIPGLERPWQQQPLPP

SEQ ID NO: 1322 - protein, 20 aa, Artificial Sequence
  gluten peptide
MDTSCIPGLERPWQQQPLPP

SEQ ID NO: 1323 - protein, 20 aa, Artificial Sequence
  gluten peptide
ETSCIPGLERPWQEQPLPPQ

SEQ ID NO: 1324 - protein, 20 aa, Artificial Sequence
  gluten peptide
MVFLQQQCIPVAMQRCLARS

SEQ ID NO: 1325 - protein, 20 aa, Artificial Sequence
  gluten peptide
LNPCKVFLQQQCIPVAMQRC

SEQ ID NO: 1326 - protein, 20 aa, Artificial Sequence
  gluten peptide
VMQQQCCQQLAQIPRQLQCA

SEQ ID NO: 1327 - protein, 20 aa, Artificial Sequence
  gluten peptide
QCCQQLAQIPRQLQCAAIHS

SEQ ID NO: 1328 - protein, 20 aa, Artificial Sequence
  gluten peptide
MQQQCCQQLAQIPRQLQCAA

SEQ ID NO: 1329 - protein, 20 aa, Artificial Sequence
  gluten peptide
QLAQIPRQLQCAAIHSVVHS

SEQ ID NO: 1330 - protein, 20 aa, Artificial Sequence
  gluten peptide
HHQQQPIQQQPHQFPQQQPC

SEQ ID NO: 1331 - protein, 20 aa, Artificial Sequence
  gluten peptide
YPQQRPMYLQPQQPISQQQA

SEQ ID NO: 1332 - protein, 20 aa, Artificial Sequence
  gluten peptide
SFPPQQPYPQQRPMYLQPQQ

SEQ ID NO: 1333 - protein, 20 aa, Artificial Sequence
  gluten peptide
YPQQRPMYLQPQQPISQQQA

SEQ ID NO: 1334 - protein, 20 aa, Artificial Sequence
  gluten peptide
IQSFLQQQMNPCKNFLLQQC

SEQ ID NO: 1335 - protein, 20 aa, Artificial Sequence
  gluten peptide
QSFLQQQMNPCKNFLLQQCN

SEQ ID NO: 1336 - protein, 20 aa, Artificial Sequence
  gluten peptide
IQPYLQQQMNPCKNYLLQQC

SEQ ID NO: 1337 - protein, 20 aa, Artificial Sequence
  gluten peptide
PQQQQPAIQSFLQQQMNPCK

SEQ ID NO: 1338 - protein, 20 aa, Artificial Sequence
  gluten peptide
IQPYLQQQMNPCKNYLLQQC

SEQ ID NO: 1339 - protein, 20 aa, Artificial Sequence
  gluten peptide
LQQQMNPCKNYLLQQCNPVS

SEQ ID NO: 1340 - protein, 20 aa, Artificial Sequence
  gluten peptide
SRLLSPRGKELHTPQEQFPQ

SEQ ID NO: 1341 - protein, 20 aa, Artificial Sequence
  gluten peptide
SRLLSPRGKELHTPQEQFPQ

SEQ ID NO: 1342 - protein, 20 aa, Artificial Sequence
  gluten peptide
IILHQQQQQQQPSSQVSLQQ

SEQ ID NO: 1343 - protein, 20 aa, Artificial Sequence
  gluten peptide
ILPRSDCQVMQQQCCQQLAQ

SEQ ID NO: 1344 - protein, 20 aa, Artificial Sequence
  gluten peptide
SMILPRSDCQVMQQQCCQQL

SEQ ID NO: 1345 - protein, 20 aa, Artificial Sequence
  gluten peptide
VSIILPRSDCQVMQQQCCQQ

SEQ ID NO: 1346 - protein, 20 aa, Artificial Sequence
  gluten peptide
QPYLQLQPFSQPQLPYSQPQ

SEQ ID NO: 1347 - protein, 20 aa, Artificial Sequence
  gluten peptide
LQLQPFSQPQLPYSQPQPFR

SEQ ID NO: 1348 - protein, 20 aa, Artificial Sequence
  gluten peptide
SQQPYLQLQPFSQPQLPYSQ

SEQ ID NO: 1349 - protein, 20 aa, Artificial Sequence
  gluten peptide
LQLQPFSQPQLPYSQPQPFR

SEQ ID NO: 1350 - protein, 20 aa, Artificial Sequence
  gluten peptide
QQQPILPQLPFSQQQQPVLP

SEQ ID NO: 1351 - protein, 20 aa, Artificial Sequence
  gluten peptide
PLISQQQQLPFSQQQQPQFS

SEQ ID NO: 1352 - protein, 20 aa, Artificial Sequence
  gluten peptide
PSFLQQQPILPQLPFSQQQQ

SEQ ID NO: 1353 - protein, 20 aa, Artificial Sequence
  gluten peptide
PQQPQQPFPLQPQQPFPQQP

SEQ ID NO: 1354 - protein, 20 aa, Artificial Sequence
  gluten peptide
PQQPQQPFPLQPQQPFPQQP

SEQ ID NO: 1355 - protein, 20 aa, Artificial Sequence
  gluten peptide
PQQLQQPFPLQPQQPFPQQP

SEQ ID NO: 1356 - protein, 20 aa, Artificial Sequence
  gluten peptide
PQQPQQPFPLQPQQPFPQQP

SEQ ID NO: 1357 - protein, 20 aa, Artificial Sequence
  gluten peptide
PQQPFPLQPQQSFLWQSQQP

SEQ ID NO: 1358 - protein, 20 aa, Artificial Sequence
  gluten peptide
SEQIIPQQLQQPFPLQPQQP

SEQ ID NO: 1359 - protein, 20 aa, Artificial Sequence
  gluten peptide
PQQPFPLQPQQSFLWQSQQP

SEQ ID NO: 1360 - protein, 20 aa, Artificial Sequence
  gluten peptide
PRIPEQSRYDAIRAIIYSIV

SEQ ID NO: 1361 - protein, 20 aa, Artificial Sequence
  gluten peptide
QSRYDAIRAIIYSIVLQEQQ

SEQ ID NO: 1362 - protein, 20 aa, Artificial Sequence
  gluten peptide
QSRYDAIRAIIYSIVLQEQQ

SEQ ID NO: 1363 - protein, 20 aa, Artificial Sequence
  gluten peptide
PRIPEQSRYDAIRAIIYSIV

SEQ ID NO: 1364 - protein, 20 aa, Artificial Sequence
  gluten peptide
PRIPEQSRYDAIRAIIYSIV

SEQ ID NO: 1365 - protein, 20 aa, Artificial Sequence
  gluten peptide
QSRYDAIRAIIYSIVLQEQQ

SEQ ID NO: 1366 - protein, 20 aa, Artificial Sequence
  gluten peptide
PEQSRYDAIRAITYPIILQE

SEQ ID NO: 1367 - protein, 20 aa, Artificial Sequence
  gluten peptide
QCCQQLPRIPEQSRYDAIRA

SEQ ID NO: 1368 - protein, 20 aa, Artificial Sequence
  gluten peptide
EQSRYDAIRAITYSIILQEQ

SEQ ID NO: 1369 - protein, 20 aa, Artificial Sequence
  gluten peptide
QCCQQLPRIPEQSRYDAIRA

SEQ ID NO: 1370 - protein, 20 aa, Artificial Sequence
  gluten peptide
QSRYDAIRAIIYSIVLQEQQ

SEQ ID NO: 1371 - protein, 20 aa, Artificial Sequence
  gluten peptide
PRIPEQSRYDAIRAIIYSIV

SEQ ID NO: 1372 - protein, 20 aa, Artificial Sequence
  gluten peptide
FLQQPQQPSPQPQQVVQIIS

SEQ ID NO: 1373 - protein, 20 aa, Artificial Sequence
  gluten peptide
SQQPFLQQPQQPSPQPQQVV

SEQ ID NO: 1374 - protein, 20 aa, Artificial Sequence
  gluten peptide
PQQPSPQPQQVVQIISPATP

SEQ ID NO: 1375 - protein, 20 aa, Artificial Sequence
  gluten peptide
QPPFSLHQQPVLPQQQIPYV

SEQ ID NO: 1376 - protein, 20 aa, Artificial Sequence
  gluten peptide
QPPFSLHQQPVLPQQQIPYV

SEQ ID NO: 1377 - protein, 20 aa, Artificial Sequence
  gluten peptide
QPILPQQPPFSLHQQPVLPQ

SEQ ID NO: 1378 - protein, 20 aa, Artificial Sequence
  gluten peptide
QPILPQQPPFSLHQQPVLPQ

SEQ ID NO: 1379 - protein, 20 aa, Artificial Sequence
  gluten peptide
QQQQQPILPQQPPFSLHQQP

SEQ ID NO: 1380 - protein, 20 aa, Artificial Sequence
  gluten peptide
QPPFSLHQQPVLPQQQIPYV

SEQ ID NO: 1381 - protein, 20 aa, Artificial Sequence
  gluten peptide
QPPFSLHQQPVLPQQQIPYV

SEQ ID NO: 1382 - protein, 20 aa, Artificial Sequence
  gluten peptide
QPILPQQPPFSLHQQPVLPQ

SEQ ID NO: 1383 - protein, 20 aa, Artificial Sequence
  gluten peptide
QPILPQQPPFSLHQQPVLPQ

SEQ ID NO: 1384 - protein, 20 aa, Artificial Sequence
  gluten peptide
DAIRAITYPIILQEQQQGFV

SEQ ID NO: 1385 - protein, 20 aa, Artificial Sequence
  gluten peptide
PFSQQQQPPFSQQQQPVLPQ

SEQ ID NO: 1386 - protein, 20 aa, Artificial Sequence
  gluten peptide
QQPPFSQQQQPPFSQQPLIS

SEQ ID NO: 1387 - protein, 20 aa, Artificial Sequence
  gluten peptide
QPSFSQQQQPPFSQQQPPFS

SEQ ID NO: 1388 - protein, 20 aa, Artificial Sequence
  gluten peptide
QQQQPFTQQQQPPFSQQPPI

SEQ ID NO: 1389 - protein, 20 aa, Artificial Sequence
  gluten peptide
PPFSQQQQPSFSQQQQPPFS

SEQ ID NO: 1390 - protein, 20 aa, Artificial Sequence
  gluten peptide
QQQQPPFSQQQQPPFSQQQQ

SEQ ID NO: 1391 - protein, 20 aa, Artificial Sequence
  gluten peptide
SQQQQAPPFSQQQQPPFSQQ

SEQ ID NO: 1392 - protein, 20 aa, Artificial Sequence
  gluten peptide
FSQQQQPQFSQQQQPPYSQQ

SEQ ID NO: 1393 - protein, 20 aa, Artificial Sequence
  gluten peptide
PSFSQQQQQPPFTQQQQPPF

SEQ ID NO: 1394 - protein, 20 aa, Artificial Sequence
  gluten peptide
VLPQQPPFSQQQQPPFRSST

SEQ ID NO: 1395 - protein, 20 aa, Artificial Sequence
  gluten peptide
ISQQQQAPPFSQQQQPPFSQ

SEQ ID NO: 1396 - protein, 20 aa, Artificial Sequence
  gluten peptide
PPFSQQQQPPFSQQQQSPFS

SEQ ID NO: 1397 - protein, 20 aa, Artificial Sequence
  gluten peptide
FSQQQQPPFRSSTHSSQQPP

SEQ ID NO: 1398 - protein, 20 aa, Artificial Sequence
  gluten peptide
ISQQQQPPPFSQQQQPPFSQ

SEQ ID NO: 1399 - protein, 20 aa, Artificial Sequence
  gluten peptide
QPPYSQQQQPPYSQQQQPPF

SEQ ID NO: 1400 - protein, 20 aa, Artificial Sequence
  gluten peptide
QRQLPPFSQQQQPPFSQQQQ

SEQ ID NO: 1401 - protein, 20 aa, Artificial Sequence
  gluten peptide
FSQQQQPPFSQQQQPPYSQQ

SEQ ID NO: 1402 - protein, 20 aa, Artificial Sequence
  gluten peptide
EQQPPFSQQQQPPFSQQQQP

SEQ ID NO: 1403 - protein, 20 aa, Artificial Sequence
  gluten peptide
PFSQQQQPPFSQHQQPVLPQ

SEQ ID NO: 1404 - protein, 20 aa, Artificial Sequence
  gluten peptide
YSQQQQPPYSQQQQPPFSQQ

SEQ ID NO: 1405 - protein, 20 aa, Artificial Sequence
  gluten peptide
QQQQQQQQPFTQQQQPPFSQ

SEQ ID NO: 1406 - protein, 20 aa, Artificial Sequence
  gluten peptide
FSQQQQPPFSQQQQQPPFTQ

SEQ ID NO: 1407 - protein, 20 aa, Artificial Sequence
  gluten peptide
QQQQPPFSQEQQPPFSQQQQ

SEQ ID NO: 1408 - protein, 20 aa, Artificial Sequence
  gluten peptide
FTQQQQPPFSQQSPISQQQQ

SEQ ID NO: 1409 - protein, 20 aa, Artificial Sequence
  gluten peptide
NIQQQQPPFSQQQQPPFSQQ

SEQ ID NO: 1410 - protein, 20 aa, Artificial Sequence
  gluten peptide
QQQPPFTQQQQPPFSQQSPI

SEQ ID NO: 1411 - protein, 20 aa, Artificial Sequence
  gluten peptide
SQHQQPVLPQQQIPSVQPSI

SEQ ID NO: 1412 - protein, 20 aa, Artificial Sequence
  gluten peptide
QQPLFSQKQQPVLPQQPAFS

SEQ ID NO: 1413 - protein, 20 aa, Artificial Sequence
  gluten peptide
PLFSQKQQPVLPQQPPFSQQ

SEQ ID NO: 1414 - protein, 20 aa, Artificial Sequence
  gluten peptide
SQQQQPPFSQHQQPVLPQQQ

SEQ ID NO: 1415 - protein, 20 aa, Artificial Sequence
  gluten peptide
PFSQQQQPPFSQHQQPVLPQ

SEQ ID NO: 1416 - protein, 20 aa, Artificial Sequence
  gluten peptide
FSQQQPPFSQQTQPVLPQQS

SEQ ID NO: 1417 - protein, 20 aa, Artificial Sequence
  gluten peptide
FTQQQQPPFSQQSPISQQQQ

SEQ ID NO: 1418 - protein, 20 aa, Artificial Sequence
  gluten peptide
QQQPPFTQQQQPPFSQQSPI

SEQ ID NO: 1419 - protein, 20 aa, Artificial Sequence
  gluten peptide
QQQQQQQQQPLSQVSFQQPQ

SEQ ID NO: 1420 - protein, 20 aa, Artificial Sequence
  gluten peptide
QQQQQQQQQPLSQVCFQQSQ

SEQ ID NO: 1421 - protein, 20 aa, Artificial Sequence
  gluten peptide
PFSQQQQQQQQQQPPFSQQQ

SEQ ID NO: 1422 - protein, 15 aa, Artificial Sequence
  gluten peptide
GSGQQQQQQEQPGSG

SEQ ID NO: 1423 - protein, 20 aa, Artificial Sequence
  gluten peptide
PPFSQQQQQQQQPFPQQPSF

SEQ ID NO: 1424 - protein, 20 aa, Artificial Sequence
  gluten peptide
QQQQSPFSQQQEQQQQPPFL

SEQ ID NO: 1425 - protein, 20 aa, Artificial Sequence
  gluten peptide
SPISQQQQQQQQQQQQPFTQ

SEQ ID NO: 1426 - protein, 20 aa, Artificial Sequence
  gluten peptide
SQQQEQQQQPPFLQQQQPPF

SEQ ID NO: 1427 - protein, 16 aa, Artificial Sequence
  gluten peptide
GQQQQQQQEQPLSQVG

SEQ ID NO: 1428 - protein, 20 aa, Artificial Sequence
  gluten peptide
QQLQQQQQQQQQQQQPSSQV

SEQ ID NO: 1429 - protein, 20 aa, Artificial Sequence
  gluten peptide
QQQQPPFTQQQQQQQQQQPF

SEQ ID NO: 1430 - protein, 16 aa, Artificial Sequence
  gluten peptide
GQQQQQQQQQPLSQVG

SEQ ID NO: 1431 - protein, 20 aa, Artificial Sequence
  gluten peptide
QQQQQQQQQPSSQVSFQQPQ

SEQ ID NO: 1432 - protein, 20 aa, Artificial Sequence
  gluten peptide
QQQQQQQQPFTQQQQPPFSQ

SEQ ID NO: 1433 - protein, 20 aa, Artificial Sequence
  gluten peptide
QQPPFSQQQQQQQQQPFPQQ

SEQ ID NO: 1434 - protein, 20 aa, Artificial Sequence
  gluten peptide
QQLQQQQQQQQQQPLSQVCF

SEQ ID NO: 1435 - protein, 20 aa, Artificial Sequence
  gluten peptide
QQLQQQQQQQQQQPLSQVSF

SEQ ID NO: 1436 - protein, 20 aa, Artificial Sequence
  gluten peptide
ILHQQHHHHQQQQQQQQQQP

SEQ ID NO: 1437 - protein, 20 aa, Artificial Sequence
  gluten peptide
QQPPFSQQQQQQQQQPPFSQ

SEQ ID NO: 1438 - protein, 20 aa, Artificial Sequence
  gluten peptide
QQQQQQQQQPLSQVSFQQPQ

SEQ ID NO: 1439 - protein, 20 aa, Artificial Sequence
  gluten peptide
HHHQQQQQQQQQQPLSQVSF

SEQ ID NO: 1440 - protein, 20 aa, Artificial Sequence
  gluten peptide
AIILHQQQQQQQQQQQQPLS

SEQ ID NO: 1441 - protein, 20 aa, Artificial Sequence
  gluten peptide
PFSQQQQQQQQQQPPFSQQQ

SEQ ID NO: 1442 - protein, 20 aa, Artificial Sequence
  gluten peptide
SQQQPPFSQQQQQPPFSQQQ

SEQ ID NO: 1443 - protein, 20 aa, Artificial Sequence
  gluten peptide
ISQQQQQPPFSQQQQPQFSQ

SEQ ID NO: 1444 - protein, 20 aa, Artificial Sequence
  gluten peptide
PSFSQQQQQPPFTQQQQPPF

SEQ ID NO: 1445 - protein, 20 aa, Artificial Sequence
  gluten peptide
FSQQQQPPFSQQQQQPPFTQ

SEQ ID NO: 1446 - protein, 20 aa, Artificial Sequence
  gluten peptide
QQPPFSQQQQQQQQQPPFSQ

SEQ ID NO: 1447 - protein, 20 aa, Artificial Sequence
  gluten peptide
QIPSVQPSILQQLNPCKLFL

SEQ ID NO: 1448 - protein, 20 aa, Artificial Sequence
  gluten peptide
PVLPQQQIPSVQPSILQQLN

SEQ ID NO: 1449 - protein, 20 aa, Artificial Sequence
  gluten peptide
QQQLGQCSFQQPQQQLGQQP

SEQ ID NO: 1450 - protein, 20 aa, Artificial Sequence
  gluten peptide
QLSSQVSFQQPQQQLGQQPQ

SEQ ID NO: 1451 - protein, 20 aa, Artificial Sequence
  gluten peptide
SFQQPQQQLGQQPQQQQQQV

SEQ ID NO: 1452 - protein, 20 aa, Artificial Sequence
  gluten peptide
QPQQQLGQQPQQQQQQQVLQ

SEQ ID NO: 1453 - protein, 20 aa, Artificial Sequence
  gluten peptide
SFQQPQQQLGQQPQQQQQQV

SEQ ID NO: 1454 - protein, 20 aa, Artificial Sequence
  gluten peptide
QQQLGQCSFQQPQQQLGQQP

SEQ ID NO: 1455 - protein, 20 aa, Artificial Sequence
  gluten peptide
CSFQQPQQQLGQQPQQQQQQ

SEQ ID NO: 1456 - protein, 20 aa, Artificial Sequence
  gluten peptide
QQQLGQCSFQQPQQQLGQQP

SEQ ID NO: 1457 - protein, 20 aa, Artificial Sequence
  gluten peptide
LGQCSFQQPQQQQLGQWPQQ

SEQ ID NO: 1458 - protein, 20 aa, Artificial Sequence
  gluten peptide
SQQQLLQCSFQQPQQQLGQQ

SEQ ID NO: 1459 - protein, 20 aa, Artificial Sequence
  gluten peptide
QSQQQLGQCSFQQPQQQLGQ

SEQ ID NO: 1460 - protein, 20 aa, Artificial Sequence
  gluten peptide
QQQLGQCSFQQPQQQLGQQP

SEQ ID NO: 1461 - protein, 20 aa, Artificial Sequence
  gluten peptide
CSFQQPQQQLGQQPQQQQQQ

SEQ ID NO: 1462 - protein, 16 aa, Artificial Sequence
  gluten peptide
GPLRELCCQHLWQIPG

SEQ ID NO: 1463 - protein, 20 aa, Artificial Sequence
  gluten peptide
QSTYQLLRELCCQHLWQIPE

SEQ ID NO: 1464 - protein, 20 aa, Artificial Sequence
  gluten peptide
QSTYQLLRELCCQHLWQIPE

SEQ ID NO: 1465 - protein, 16 aa, Artificial Sequence
  gluten peptide
GPLRELCCEHLWQIPG

SEQ ID NO: 1466 - protein, 20 aa, Artificial Sequence
  gluten peptide
QSTYQLLRELCCQHLWQIPE

SEQ ID NO: 1467 - protein, 20 aa, Artificial Sequence
  gluten peptide
PEPPFSLQQQPVLPQQSPFS

SEQ ID NO: 1468 - protein, 20 aa, Artificial Sequence
  gluten peptide
QQPILPEPPFSLQQQPVLPQ

SEQ ID NO: 1469 - protein, 20 aa, Artificial Sequence
  gluten peptide
PSFLQQQPILPQLPFSQQQQ

SEQ ID NO: 1470 - protein, 20 aa, Artificial Sequence
  gluten peptide
PFSQQQPSFLQQQPILPQLP

SEQ ID NO: 1471 - protein, 20 aa, Artificial Sequence
  gluten peptide
QRPPFSQQQQQPVLPQQPPF

SEQ ID NO: 1472 - protein, 20 aa, Artificial Sequence
  gluten peptide
LQQPPFSQQRPPFSQQQQQP

SEQ ID NO: 1473 - protein, 20 aa, Artificial Sequence
  gluten peptide
QRPPFSQQQQQPVLPQQPPF

SEQ ID NO: 1474 - protein, 20 aa, Artificial Sequence
  gluten peptide
LQQPPFSQQRPPFSQQQQQP

SEQ ID NO: 1475 - protein, 20 aa, Artificial Sequence
  gluten peptide
SVLQQLNPCMVFLQQQCIPV

SEQ ID NO: 1476 - protein, 20 aa, Artificial Sequence
  gluten peptide
MVFLQQQCIPVAMQRCLARS

SEQ ID NO: 1477 - protein, 20 aa, Artificial Sequence
  gluten peptide
QQSFPQQQRPFIQPSLQQQL

SEQ ID NO: 1478 - protein, 20 aa, Artificial Sequence
  gluten peptide
QPQQPQQSFPQQQRPFIQPS

SEQ ID NO: 1479 - protein, 20 aa, Artificial Sequence
  gluten peptide
FPQQQRPFIQPSLQQQLNPC

SEQ ID NO: 1480 - protein, 20 aa, Artificial Sequence
  gluten peptide
GYYPTFPQLPGQLQQPAQGQ

SEQ ID NO: 1481 - protein, 16 aa, Artificial Sequence
  gluten peptide
GGQVQWLQEQLVPQLG

SEQ ID NO: 1482 - protein, 20 aa, Artificial Sequence
  gluten peptide
PSGQVQWLQQQLVPQLQQPL

SEQ ID NO: 1483 - protein, 16 aa, Artificial Sequence
  gluten peptide
GGQVQWLEEQLVPQLG

SEQ ID NO: 1484 - protein, 16 aa, Artificial Sequence
  gluten peptide
GGQVQWLQQQLVPQLG

SEQ ID NO: 1485 - protein, 20 aa, Artificial Sequence
  gluten peptide
PSGQVQWLQQQLVPQLQQPL

SEQ ID NO: 1486 - protein, 20 aa, Artificial Sequence
  gluten peptide
FPQQQPPFIQPSLQQQVNPC

SEQ ID NO: 1487 - protein, 20 aa, Artificial Sequence
  gluten peptide
PQQQPPFIQPSLQQQVNPCK

SEQ ID NO: 1488 - protein, 20 aa, Artificial Sequence
  gluten peptide
QQPQQSFPQQQPPFIQPSLQ

SEQ ID NO: 1489 - protein, 20 aa, Artificial Sequence
  gluten peptide
QQPLFSQKQQPVLPQQPAFS

SEQ ID NO: 1490 - protein, 20 aa, Artificial Sequence
  gluten peptide
KQQPVLPQQPAFSQQQQTVL

SEQ ID NO: 1491 - protein, 20 aa, Artificial Sequence
  gluten peptide
QQQTVLPQQPAFSQQQHQQL

SEQ ID NO: 1492 - protein, 20 aa, Artificial Sequence
  gluten peptide
LQQPQQPFPQPQQQLPQPQQ

SEQ ID NO: 1493 - protein, 16 aa, Artificial Sequence
  gluten peptide
GQQPFPQPEQQLPQPG

SEQ ID NO: 1494 - protein, 20 aa, Artificial Sequence
  gluten peptide
LQQPQQPFPQPQQQLPQPQQ

SEQ ID NO: 1495 - protein, 16 aa, Artificial Sequence
  gluten peptide
GQQPFPQPQQQLPQPG

SEQ ID NO: 1496 - protein, 20 aa, Artificial Sequence
  gluten peptide
QPFPQPQQQLPQPQQPQQSF

SEQ ID NO: 1497 - protein, 20 aa, Artificial Sequence
  gluten peptide
PQPQQQLPQPQQPQQSFPQQ

SEQ ID NO: 1498 - protein, 20 aa, Artificial Sequence
  gluten peptide
GTANMQVDPSSQVQWPQQQP

SEQ ID NO: 1499 - protein, 20 aa, Artificial Sequence
  gluten peptide
GTANMQVDPSSQVQWPQQQP

SEQ ID NO: 1500 - protein, 20 aa, Artificial Sequence
  gluten peptide
GTANMQVDPSSQVQWPQQQP

SEQ ID NO: 1501 - protein, 20 aa, Artificial Sequence
  gluten peptide
QQQQQQQQQGMHIFLPLSQQ

SEQ ID NO: 1502 - protein, 20 aa, Artificial Sequence
  gluten peptide
IMQQQQQQQQQQGMHIFLPL

SEQ ID NO: 1503 - protein, 20 aa, Artificial Sequence
  gluten peptide
QQQQGMHIFLPLSQQQQVGQ

SEQ ID NO: 1504 - protein, 20 aa, Artificial Sequence
  gluten peptide
CQAIHKVVHAIILHQQQKQQ

SEQ ID NO: 1505 - protein, 20 aa, Artificial Sequence
  gluten peptide
QAIHKVVHAIILHQQQKQQQ

SEQ ID NO: 1506 - protein, 20 aa, Artificial Sequence
  gluten peptide
LRTLPMMCSVNVPVYGTTTS

SEQ ID NO: 1507 - protein, 20 aa, Artificial Sequence
  gluten peptide
LPTMCGVNVPLYGTTTSVPF

SEQ ID NO: 1508 - protein, 20 aa, Artificial Sequence
  gluten peptide
VPVYGTTTSVPFGVGTQVGA

SEQ ID NO: 1509 - protein, 20 aa, Artificial Sequence
  gluten peptide
CSVNVPVYGTTTSVPFGVGT

SEQ ID NO: 1510 - protein, 20 aa, Artificial Sequence
  gluten peptide
PQPQQLGQQPQQQEVPQVAF

SEQ ID NO: 1511 - protein, 20 aa, Artificial Sequence
  gluten peptide
QCSFQQPQPQQLGQQPQQQE

SEQ ID NO: 1512 - protein, 20 aa, Artificial Sequence
  gluten peptide
QGVSQPQQQSGQQQLVQCSF

SEQ ID NO: 1513 - protein, 20 aa, Artificial Sequence
  gluten peptide
QSGQQQLVQCSFQQPQPQQL

SEQ ID NO: 1514 - protein, 20 aa, Artificial Sequence
  gluten peptide
PQPFPPQLPYPQPQLPYPQP

SEQ ID NO: 1515 - protein, 20 aa, Artificial Sequence
  gluten peptide
PQPFPPQLPYPQPQLPYPQP

SEQ ID NO: 1516 - protein, 20 aa, Artificial Sequence
  gluten peptide
QPFPPQLPYPQPQPFRPQQP

SEQ ID NO: 1517 - protein, 20 aa, Artificial Sequence
  gluten peptide
PQPFPPQLPYPQPQLPYPQP

SEQ ID NO: 1518 - protein, 20 aa, Artificial Sequence
  gluten peptide
LQLQPFPQPQPFPPQLPYPQ

SEQ ID NO: 1519 - protein, 20 aa, Artificial Sequence
  gluten peptide
PQPFPPQLPYPQPQPFRPQQ

SEQ ID NO: 1520 - protein, 20 aa, Artificial Sequence
  gluten peptide
PQPFPPQLPYPQPPPFSPQQ

SEQ ID NO: 1521 - protein, 20 aa, Artificial Sequence
  gluten peptide
LQLQPFPQPQPFPPQLPYPQ

SEQ ID NO: 1522 - protein, 20 aa, Artificial Sequence
  gluten peptide
PQPFPPQLPYPQPQSFPPQQ

SEQ ID NO: 1523 - protein, 20 aa, Artificial Sequence
  gluten peptide
MQLQPFPQPQPFPPQLPYPQ

SEQ ID NO: 1524 - protein, 16 aa, Artificial Sequence
  gluten peptide
GQPQPFPPELPYPQPG

SEQ ID NO: 1525 - protein, 16 aa, Artificial Sequence
  gluten peptide
GQPQPFPPQLPYPQPG

SEQ ID NO: 1526 - protein, 20 aa, Artificial Sequence
  gluten peptide
PFPQPQPFPPQLPYPQPPPF

SEQ ID NO: 1527 - protein, 20 aa, Artificial Sequence
  gluten peptide
PFPQPQPFPPQLPYPQPQSF

SEQ ID NO: 1528 - protein, 20 aa, Artificial Sequence
  gluten peptide
PQPQPFPQPQPFPPQLPYPQ

SEQ ID NO: 1529 - protein, 20 aa, Artificial Sequence
  gluten peptide
PQPFPPQLPYPQPPPFSPQQ

SEQ ID NO: 1530 - protein, 15 aa, Artificial Sequence
  gluten peptide
GSGFPPELPYPQGSG

SEQ ID NO: 1531 - protein, 20 aa, Artificial Sequence
  gluten peptide
PQPQPFPPQLPYPQTQPFPP

SEQ ID NO: 1532 - protein, 20 aa, Artificial Sequence
  gluten peptide
PQPFPPQLPYPQTQPFPPQQ

SEQ ID NO: 1533 - protein, 20 aa, Artificial Sequence
  gluten peptide
QPFPPQLPYPQTQPFPPQQP

SEQ ID NO: 1534 - protein, 20 aa, Artificial Sequence
  gluten peptide
CKVFLQQQCSPVAMPQRLAR

SEQ ID NO: 1535 - protein, 16 aa, Artificial Sequence
  gluten peptide
LQQQCSPVAMPQRLAR

SEQ ID NO: 1536 - protein, 20 aa, Artificial Sequence
  gluten peptide
VFLQQCSPVAMPQRLARSQM

SEQ ID NO: 1537 - protein, 20 aa, Artificial Sequence
  gluten peptide
LNPCKVFLQQQCSPVAMPQR

SEQ ID NO: 1538 - protein, 20 aa, Artificial Sequence
  gluten peptide
QQQCSPVAMPQRLARSQMWQ

SEQ ID NO: 1539 - protein, 20 aa, Artificial Sequence
  gluten peptide
CSPVAMPQRLARSQMWQQSS

SEQ ID NO: 1540 - protein, 20 aa, Artificial Sequence
  gluten peptide
QCSPVAMPQHLARSQMWQQS

SEQ ID NO: 1541 - protein, 20 aa, Artificial Sequence
  gluten peptide
CKVFLQQQCSPVAMPQRLAR

SEQ ID NO: 1542 - protein, 20 aa, Artificial Sequence
  gluten peptide
QLNPCKVFLQQCSPVAMPQR

SEQ ID NO: 1543 - protein, 20 aa, Artificial Sequence
  gluten peptide
QQQCSPVAMPQRLARSQMWQ

SEQ ID NO: 1544 - protein, 20 aa, Artificial Sequence
  gluten peptide
VFLQQQCSPVAMPQHLARSQ

SEQ ID NO: 1545 - protein, 20 aa, Artificial Sequence
  gluten peptide
VFLQQQCSPVAMPQRLARSQ

SEQ ID NO: 1546 - protein, 20 aa, Artificial Sequence
  gluten peptide
SGQRQQDQQSGQGQQPGQRQ

SEQ ID NO: 1547 - protein, 20 aa, Artificial Sequence
  gluten peptide
TTPPQQLQQSILWGIPALLR

SEQ ID NO: 1548 - protein, 20 aa, Artificial Sequence
  gluten peptide
QQPPFSQQELPILPQQPPFS

SEQ ID NO: 1549 - protein, 20 aa, Artificial Sequence
  gluten peptide
QQQPPFSQQQPPFSQQELPI

SEQ ID NO: 1550 - protein, 20 aa, Artificial Sequence
  gluten peptide
FSQQQPPFSQQELPILPQQP

SEQ ID NO: 1551 - protein, 20 aa, Artificial Sequence
  gluten peptide
METSHIPGLEKPSQQQPLPL

SEQ ID NO: 1552 - protein, 20 aa, Artificial Sequence
  gluten peptide
METSRVPGLEKPWQQQPLPP

SEQ ID NO: 1553 - protein, 20 aa, Artificial Sequence
  gluten peptide
LMTSIALRTLPMMCSVNVPV

SEQ ID NO: 1554 - protein, 20 aa, Artificial Sequence
  gluten peptide
HLEVMTSIALRTLPMMCSVN

SEQ ID NO: 1555 - protein, 9 aa, Artificial Sequence
  gluten peptide
  misc_feature (2)..(2): X is Q or R
  misc_feature (7)..(7): X is F or Y
PXPZLPXPQ

SEQ ID NO: 1556 - protein, 20 aa, Artificial Sequence
  gluten peptide
PQLPYPQPQLPYPQPQPFRP

SEQ ID NO: 1557 - protein, 17 aa, Artificial Sequence
  gluten peptide
QLQPFPQPELPYPQPQP

SEQ ID NO: 1558 - protein, 9 aa, Artificial Sequence
  gluten peptide
  misc_feature (2)..(2): X is F or Y
  misc_feature (4)..(4): X is Q or R
  misc_feature (9)..(9): X is F or Y
PXPXPZLPX

SEQ ID NO: 1559 - protein, 20 aa, Artificial Sequence
  gluten peptide
PQLPYPQPQLPYPQPQPFRP

SEQ ID NO: 1560 - protein, 17 aa, Artificial Sequence
  gluten peptide
QLQPFPQPELPYPQPQP

SEQ ID NO: 1561 - protein, 9 aa, Artificial Sequence
  gluten peptide
  misc_feature (1)..(1): X is P or I or A or T
  misc_feature (5)..(5): X is P or T
  misc_feature (8)..(8): X is P or T or S
  misc_feature (9)..(9): X is F or I or T or Y
XFPQXZQXX

SEQ ID NO: 1562 - protein, 20 aa, Artificial Sequence
  gluten peptide
QPFPQPQQPFPWQPQQPFPQ

SEQ ID NO: 1563 - protein, 16 aa, Artificial Sequence
  gluten peptide
GQQPFPQPEQPFPWQG

SEQ ID NO: 1564 - protein, 16 aa, Artificial Sequence
  gluten peptide
GQQPFPQPEQPIPVQG

SEQ ID NO: 1565 - protein, 9 aa, Artificial Sequence
  gluten peptide
  misc_feature (3)..(3): X is P or T
  misc_feature (6)..(6): X is P or T or S
  misc_feature (7)..(7): X is F or I or Y
  misc_feature (8)..(8): X is P or S
  misc_feature (9)..(9): X is V or W or H or Q or L
PQXZQXXXX

SEQ ID NO: 1566 - protein, 20 aa, Artificial Sequence
  gluten peptide
QPFPQPQQPFPWQPQQPFPQ

SEQ ID NO: 1567 - protein, 16 aa, Artificial Sequence
  gluten peptide
GQQPFPQPEQPFPWQG

SEQ ID NO: 1568 - protein, 16 aa, Artificial Sequence
  gluten peptide
GQQPFPQPEQPIPVQG

SEQ ID NO: 1569 - protein, 9 aa, Artificial Sequence
  gluten peptide
  misc_feature (1)..(1): X is K or Q or W
  misc_feature (2)..(2): X is Q or R
  misc_feature (6)..(6): X is S or P or I or T
  misc_feature (7)..(7): X is F or L or Y
XXPZQXXPQ

SEQ ID NO: 1570 - protein, 20 aa, Artificial Sequence
  gluten peptide
QPQLPFPQQPQQQPQQPFPQ

SEQ ID NO: 1571 - protein, 16 aa, Artificial Sequence
  gluten peptide
GFPQTQQPEQPFPQQG

SEQ ID NO: 1572 - protein, 9 aa, Artificial Sequence
  gluten peptide
  misc_feature (2)..(2): X is F or I or Y or L
  misc_feature (3)..(3): X is P or S
  misc_feature (5)..(5): X is Q or R
  misc_feature (9)..(9): X is P or T
PXXZXPZQX

SEQ ID NO: 1573 - protein, 20 aa, Artificial Sequence
  gluten peptide
PLQPQQPFPQQPQQPFPQPQ

SEQ ID NO: 1574 - protein, 16 aa, Artificial Sequence
  gluten peptide
GQPFPEQPQQPFPQQG

SEQ ID NO: 1575 - protein, 9 aa, Artificial Sequence
  gluten peptide
FLPZLPYPQ

SEQ ID NO: 1576 - protein, 20 aa, Artificial Sequence
  gluten peptide
LQLQPFPQPQPFLPQLPYPQ

SEQ ID NO: 1577 - protein, 17 aa, Artificial Sequence
  gluten peptide
PQPQPFLPELPYPQPQS

SEQ ID NO: 1578 - protein, 9 aa, Artificial Sequence
  gluten peptide
LQQILZQQL

SEQ ID NO: 1579 - protein, 20 aa, Artificial Sequence
  gluten peptide
LQQILQQQLTPCMDVVLQQH

SEQ ID NO: 1580 - protein, 11 aa, Artificial Sequence
  gluten peptide
FSYQZQPFPQQ

SEQ ID NO: 1581 - protein, 20 aa, Artificial Sequence
  gluten peptide
PQQSFSYQQQPFPQQPYPQQ

SEQ ID NO: 1582 - protein, 9 aa, Artificial Sequence
  gluten peptide
  misc_feature (5)..(5): X is L or Q
  misc_feature (8)..(8): X is L or M
FPSZXPYXQ

SEQ ID NO: 1583 - protein, 20 aa, Artificial Sequence
  gluten peptide
PFPSQQPYLQLQPFPQPQLP

SEQ ID NO: 1584 - protein, 9 aa, Artificial Sequence
  gluten peptide
  misc_feature (1)..(1): X is P or Q or S or H
  misc_feature (7)..(7): X is L or F
  misc_feature (8)..(8): X is P or S
XQPZQZXXQ

SEQ ID NO: 1585 - protein, 20 aa, Artificial Sequence
  gluten peptide
QQPQQPFPQQPQQQFPQPQQ

SEQ ID NO: 1586 - protein, 16 aa, Artificial Sequence
  gluten peptide
GFFPQPEQEFPQPQQG

SEQ ID NO: 1587 - protein, 9 aa, Artificial Sequence
  gluten peptide
  misc_feature (2)..(2): X is F or W
  misc_feature (3)..(3): X is S or P
  misc_feature (6)..(6): X is E or Q or T
  misc_feature (9)..(9): X is V or I or L or S or F
PXXZQXQPX

SEQ ID NO: 1588 - protein, 20 aa, Artificial Sequence
  gluten peptide
QQQQPPFSQQQQPVLPQQSP

SEQ ID NO: 1589 - protein, 20 aa, Artificial Sequence
  gluten peptide
PSGQVQWPQQQQPFPQPQQP

SEQ ID NO: 1590 - protein, 16 aa, Artificial Sequence
  gluten peptide
GQPPFSEQEQPVLPQG

SEQ ID NO: 1591 - protein, 9 aa, Artificial Sequence
  gluten peptide
  misc_feature (1)..(1): X is I or L
XQPZQPFPQ

SEQ ID NO: 1592 - protein, 20 aa, Artificial Sequence
  gluten peptide
FTQPQQPTPIQPQQPFPQQP

SEQ ID NO: 1593 - protein, 16 aa, Artificial Sequence
  gluten peptide
GQQQFIQPEQPFPQQG

SEQ ID NO: 1594 - protein, 9 aa, Artificial Sequence
  gluten peptide
QQPZLPFPQ

SEQ ID NO: 1595 - protein, 20 aa, Artificial Sequence
  gluten peptide
QQPQQPFPQPQQPQLPFPQQ

SEQ ID NO: 1596 - protein, 9 aa, Artificial Sequence
  gluten peptide
QPQQPZLPF

SEQ ID NO: 1597 - protein, 20 aa, Artificial Sequence
  gluten peptide
QQPQQPFPQPQQPQLPFPQQ

SEQ ID NO: 1598 - protein, 9 aa, Artificial Sequence
  gluten peptide
PQPZQPZLP

SEQ ID NO: 1599 - protein, 20 aa, Artificial Sequence
  gluten peptide
QQPQQPFPQPQQPQLPFPQQ

SEQ ID NO: 1600 - protein, 10 aa, Artificial Sequence
  gluten peptide
VFLQQQCSPV

SEQ ID NO: 1601 - protein, 20 aa, Artificial Sequence
  gluten peptide
SVLQQLNPCKVFLQQQCSHV

SEQ ID NO: 1602 - protein, 20 aa, Artificial Sequence
  gluten peptide
CKVFLQQQCSPVAMPQRLAR

SEQ ID NO: 1603 - protein, 20 aa, Artificial Sequence
  gluten peptide
KVFLQQQCSPVAIPYRLARS

SEQ ID NO: 1604 - protein, 11 aa, Artificial Sequence
  gluten peptide
  misc_feature (2)..(2): X is W or L
  misc_feature (3)..(3): X is Q or W
MXXQSSCHVMQ

SEQ ID NO: 1605 - protein, 20 aa, Artificial Sequence
  gluten peptide
PQRLARSQMWQQSSCHVMQQ

SEQ ID NO: 1606 - protein, 19 aa, Artificial Sequence
  gluten peptide
ARSQTLWQSSCHVMQQCCR

SEQ ID NO: 1607 - protein, 9 aa, Artificial Sequence
  gluten peptide
QPQQQQLAH

SEQ ID NO: 1608 - protein, 20 aa, Artificial Sequence
  gluten peptide
QQPQQQQLAHGTFLQPHQIA

SEQ ID NO: 1609 - protein, 11 aa, Artificial Sequence
  gluten peptide
  misc_feature (9)..(9): X is F or L
FPLQPQQPXPQ

SEQ ID NO: 1610 - protein, 20 aa, Artificial Sequence
  gluten peptide
PQQLQQPFPLQPQQPFPQQP

SEQ ID NO: 1611 - protein, 9 aa, Artificial Sequence
  gluten peptide
  misc_feature (5)..(5): X is L or Q
FPPZXPYPQ

SEQ ID NO: 1612 - protein, 20 aa, Artificial Sequence
  gluten peptide
PQPFPPELPYPQPQPFRPQQ

SEQ ID NO: 1613 - protein, 17 aa, Artificial Sequence
  gluten peptide
PQPQPFPPQLPYPQPQS

SEQ ID NO: 1614 - protein, 16 aa, Artificial Sequence
  gluten peptide
GQQQPFPPEQPYPQQG

SEQ ID NO: 1615 - protein, 10 aa, Artificial Sequence
  gluten peptide
  misc_feature (5)..(5): X is H or Q or R
  misc_feature (7)..(7): X is P or W
LCCZXLXZIP

SEQ ID NO: 1616 - protein, 20 aa, Artificial Sequence
  gluten peptide
QSTYQPLQQLCCQQLWQIPE

SEQ ID NO: 1617 - protein, 9 aa, Artificial Sequence
  gluten peptide
  misc_feature (2)..(2): X is W or L or S
  misc_feature (3)..(3): X is Q or L
  misc_feature (8)..(8): X is P or Q
  misc_feature (9)..(9): X is P or Q
PXXZQPLXX

SEQ ID NO: 1618 - protein, 20 aa, Artificial Sequence
  gluten peptide
ERPWQEQPLPPQHTLFPQQQ

SEQ ID NO: 1619 - protein, 9 aa, Artificial Sequence
  gluten peptide
QPLPZQPSF

SEQ ID NO: 1620 - protein, 20 aa, Artificial Sequence
  gluten peptide
PPFSQQQQQPLPQQPSFSQQ

SEQ ID NO: 1621 - protein, 10 aa, Artificial Sequence
  gluten peptide
  misc_feature (3)..(3): X is S or P
  misc_feature (10)..(10): X is L or V or I
PFXQQQQQPX

SEQ ID NO: 1622 - protein, 20 aa, Artificial Sequence
  gluten peptide
PPFSQQQQQPLPQQPSFSQQ

SEQ ID NO: 1623 - protein, 9 aa, Artificial Sequence
  gluten peptide
IVYSTILQE

SEQ ID NO: 1624 - protein, 20 aa, Artificial Sequence
  gluten peptide
QQSRYEAIRAIVYSTILQEQ

SEQ ID NO: 1625 - protein, 10 aa, Artificial Sequence
  gluten peptide
  misc_feature (8)..(8): X is I or S
  misc_feature (9)..(9): X is L or F
PFSQZQPXXS

SEQ ID NO: 1626 - protein, 20 aa, Artificial Sequence
  gluten peptide
FSQQQPPFSQQQPILSQQPP

SEQ ID NO: 1627 - protein, 9 aa, Artificial Sequence
  gluten peptide
QGIQILRPL

SEQ ID NO: 1628 - protein, 20 aa, Artificial Sequence
  gluten peptide
QEQQQGIQILRPLFQLVQGQ

SEQ ID NO: 1629 - protein, 9 aa, Artificial Sequence
  gluten peptide
PFSSVVAGI

SEQ ID NO: 1630 - protein, 20 aa, Artificial Sequence
  gluten peptide
CSIIKAPFSSVVAGIGGQYR

SEQ ID NO: 1631 - protein, 9 aa, Artificial Sequence
  gluten peptide
YCSTTIAPV

SEQ ID NO: 1632 - protein, 19 aa, Artificial Sequence
  gluten peptide
YIPPYCSTTIAPVGIFGTN

SEQ ID NO: 1633 - protein, 9 aa, Artificial Sequence
  gluten peptide
HVAMSQRLA

SEQ ID NO: 1634 - protein, 20 aa, Artificial Sequence
  gluten peptide
QQCSHVAMSQRLARSQMWQQ

SEQ ID NO: 1635 - protein, 12 aa, Artificial Sequence
  gluten peptide
YSIILQZZZQGF

SEQ ID NO: 1636 - protein, 20 aa, Artificial Sequence
  gluten peptide
RYDAICAITYSIILQEQQQG

SEQ ID NO: 1637 - protein, 12 aa, Artificial Sequence
  gluten peptide
FPHQPQEQAFPQ

SEQ ID NO: 1638 - protein, 20 aa, Artificial Sequence
  gluten peptide
QQIFPQPQQTFPHQPQQAFP

SEQ ID NO: 1639 - protein, 16 aa, Artificial Sequence
  gluten peptide
GQTFPHQPEQAFPQPG

SEQ ID NO: 1640 - protein, 9 aa, Artificial Sequence
  gluten peptide
  misc_feature (3)..(3): X is G or S
PSXZVZWPQ

SEQ ID NO: 1641 - protein, 20 aa, Artificial Sequence
  gluten peptide
ATANMQADPSGQVQWPQQQP

SEQ ID NO: 1642 - protein, 9 aa, Artificial Sequence
  gluten peptide
GALCSSLSN

SEQ ID NO: 1643 - protein, 20 aa, Artificial Sequence
  gluten peptide
FDEEKNSTGALCSSLSNQAS

SEQ ID NO: 1644 - protein, 9 aa, Artificial Sequence
  gluten peptide
QFPZQZIPV

SEQ ID NO: 1645 - protein, 20 aa, Artificial Sequence
  gluten peptide
QPPFPQQHQQFPQQQIPVVQ

SEQ ID NO: 1646 - protein, 9 aa, Artificial Sequence
  gluten peptide
  misc_feature (2)..(2): X is F or Y
  misc_feature (7)..(7): X is Y or F
PXPZQPXPQ

SEQ ID NO: 1647 - protein, 20 aa, Artificial Sequence
  gluten peptide
QQPFPQQPYPQQPYPSQQPY

SEQ ID NO: 1648 - protein, 9 aa, Artificial Sequence
  gluten peptide
QAGQGZZGY

SEQ ID NO: 1649 - protein, 20 aa, Artificial Sequence
  gluten peptide
GQQAGQGQQGYYPTSPQQLG

SEQ ID NO: 1650 - protein, 9 aa, Artificial Sequence
  gluten peptide
TLPSMCNVY

SEQ ID NO: 1651 - protein, 20 aa, Artificial Sequence
  gluten peptide
FEEIRNLALQTLPSMCNVYI

SEQ ID NO: 1652 - protein, 9 aa, Artificial Sequence
  gluten peptide
FQPSQZNPQ

SEQ ID NO: 1653 - protein, 20 aa, Artificial Sequence
  gluten peptide
QQYPSGQGFFQPSQQNPQAQ

SEQ ID NO: 1654 - protein, 9 aa, Artificial Sequence
  gluten peptide
IRSLVLKTL

SEQ ID NO: 1655 - protein, 20 aa, Artificial Sequence
  gluten peptide
QPQQPAQLEGIRSLVLKTLP

SEQ ID NO: 1656 - protein, 17 aa, Artificial Sequence
  gluten peptide
QLQPFPQPQLPYPQPQP

SEQ ID NO: 1657 - protein, 16 aa, Artificial Sequence
  gluten peptide
GQQPFPQPEQPFPWQG

SEQ ID NO: 1658 - protein, 16 aa, Artificial Sequence
  gluten peptide
GQQPFPQPEQPIPVQG

SEQ ID NO: 1659 - protein, 16 aa, Artificial Sequence
  gluten peptide
GQQPFPQPEQPFPWQG

SEQ ID NO: 1660 - protein, 16 aa, Artificial Sequence
  gluten peptide
GFPQTQQPEQPFPQQG

SEQ ID NO: 1661 - protein, 16 aa, Artificial Sequence
  gluten peptide
GFPQTQQPEQPFPQQG

SEQ ID NO: 1662 - protein, 16 aa, Artificial Sequence
  gluten peptide
GQPFPEQPQQPFPQQG

SEQ ID NO: 1663 - protein, 17 aa, Artificial Sequence
  gluten peptide
PQPQPFLPQLPYPQPQS

SEQ ID NO: 1664 - protein, 16 aa, Artificial Sequence
  gluten peptide
GFFPQPEQEFPQPQQG

SEQ ID NO: 1665 - protein, 16 aa, Artificial Sequence
  gluten peptide
GFFPQPEQEFPQPQQG

SEQ ID NO: 1666 - protein, 16 aa, Artificial Sequence
  gluten peptide
GQPPFSEQEQPVLPQG

SEQ ID NO: 1667 - protein, 16 aa, Artificial Sequence
  gluten peptide
GQPPFSEQEQPVLPQG

SEQ ID NO: 1668 - protein, 16 aa, Artificial Sequence
  gluten peptide
GQQQFIQPEQPFPQQG

SEQ ID NO: 1669 - protein, 17 aa, Artificial Sequence
  gluten peptide
PQPQPFPPQLPYPQPQS

SEQ ID NO: 1670 - protein, 16 aa, Artificial Sequence
  gluten peptide
GQQQPFPPEQPYPQQG

SEQ ID NO: 1671 - protein, 16 aa, Artificial Sequence
  gluten peptide
GQTFPHQPEQAFPQPG

SEQ ID NO: 1672 - protein, 20 aa, Artificial Sequence
  gluten peptide
TTTVQYDPSEQYQPYPEQQQ

SEQ ID NO: 1673 - protein, 20 aa, Artificial Sequence
  gluten peptide
QFDPSEQYQPYPEQQQPILQ

SEQ ID NO: 1674 - protein, 20 aa, Artificial Sequence
  gluten peptide
VQYDPSEQYQPYPEQQQPFV

SEQ ID NO: 1675 - protein, 20 aa, Artificial Sequence
  gluten peptide
TVQYNPSEQYQPYPEQQEPF

SEQ ID NO: 1676 - protein, 20 aa, Artificial Sequence
  gluten peptide
YQPYPEQQQPILQQQQMLLQ

SEQ ID NO: 1677 - protein, 20 aa, Artificial Sequence
  gluten peptide
EQYQPYPEQQQPFVQQQPPF

SEQ ID NO: 1678 - protein, 20 aa, Artificial Sequence
  gluten peptide
SEQYQPYPEQQPFMQPLLQQ

SEQ ID NO: 1679 - protein, 20 aa, Artificial Sequence
  gluten peptide
CRRLEQIPEQLRCPAIHSVV

SEQ ID NO: 1680 - protein, 20 aa, Artificial Sequence
  gluten peptide
QIPEQLRCPAIHSVVQAIIL

SEQ ID NO: 1681 - protein, 20 aa, Artificial Sequence
  gluten peptide
NNKREQQFGQNIFSGFSVQL

SEQ ID NO: 1682 - protein, 20 aa, Artificial Sequence
  gluten peptide
QILRQAICQVTRQQCCRQLA

SEQ ID NO: 1683 - protein, 20 aa, Artificial Sequence
  gluten peptide
VPFLRSQILRQSTCHVMRRQ

SEQ ID NO: 1684 - protein, 9 aa, Artificial Sequence
  gluten peptide
DPSEQYQPY

SEQ ID NO: 1685 - protein, 9 aa, Artificial Sequence
  gluten peptide
PYPEQQQPI

SEQ ID NO: 1686 - protein, 10 aa, Artificial Sequence
  gluten peptide
DPSEQYQPYP

SEQ ID NO: 1687 - protein, 9 aa, Artificial Sequence
  gluten peptide
PYPEQQQPF

SEQ ID NO: 1688 - protein, 10 aa, Artificial Sequence
  gluten peptide
DPSEQYQPYP

SEQ ID NO: 1689 - protein, 9 aa, Artificial Sequence
  gluten peptide
PYPEQQEPF

SEQ ID NO: 1690 - protein, 10 aa, Artificial Sequence
  gluten peptide
DPSEQYQPYP

SEQ ID NO: 1691 - protein, 9 aa, Artificial Sequence
  gluten peptide
PYPEQQQPI

SEQ ID NO: 1692 - protein, 9 aa, Artificial Sequence
  gluten peptide
PYPEQQQPF

SEQ ID NO: 1693 - protein, 9 aa, Artificial Sequence
  gluten peptide
PYPEQQPFM

SEQ ID NO: 1694 - protein, 9 aa, Artificial Sequence
  gluten peptide
RRLEQIPEQ

SEQ ID NO: 1695 - protein, 10 aa, Artificial Sequence
  gluten peptide
  misc_feature (9)..(9): X is I or F
  misc_feature (10)..(10): X is V or L or M
PYPEQZQPXX

SEQ ID NO: 1696 - protein, 20 aa, Artificial Sequence
  gluten peptide
QFDPSEQYQPYPEQQQPILQ

SEQ ID NO: 1697 - protein, 20 aa, Artificial Sequence
  gluten peptide
CRRLEQIPEQLRCPAIHSVV

SEQ ID NO: 1698 - protein, 20 aa, Artificial Sequence
  gluten peptide
QFGQNIFSGFSVQLLSEALG

SEQ ID NO: 1699 - protein, 9 aa, Artificial Sequence
  gluten peptide
QQPTPIQPQ

SEQ ID NO: 1700 - protein, 9 aa, Artificial Sequence
  gluten peptide
QQPFPQQPQ

SEQ ID NO: 1701 - protein, 9 aa, Artificial Sequence
  gluten peptide
QQPFPWQPQ

SEQ ID NO: 1702 - protein, 9 aa, Artificial Sequence
  gluten peptide
QQPFPQSQQ

SEQ ID NO: 1703 - protein, 9 aa, Artificial Sequence
  gluten peptide
QQPFPLQPQ

SEQ ID NO: 1704 - protein, 9 aa, Artificial Sequence
  gluten peptide
QQPFPQLQQ

SEQ ID NO: 1705 - protein, 9 aa, Artificial Sequence
  gluten peptide
QQPIPVQPQ

SEQ ID NO: 1706 - protein, 9 aa, Artificial Sequence
  gluten peptide
QQPIPQQPQ

SEQ ID NO: 1707 - protein, 9 aa, Artificial Sequence
  gluten peptide
QQPYPQQPQ

SEQ ID NO: 1708 - protein, 12 aa, Artificial Sequence
  gluten peptide
PQQPQQSFPQQQ

SEQ ID NO: 1709 - protein, 12 aa, Artificial Sequence
  gluten peptide
PQQPQQPFPQQQ

SEQ ID NO: 1710 - protein, 9 aa, Artificial Sequence
  gluten peptide
QGSFQPSQQ

SEQ ID NO: 1711 - protein, 10 aa, Artificial Sequence
  gluten peptide
PQQPFPQPQQ

SEQ ID NO: 1712 - protein, 10 aa, Artificial Sequence
  gluten peptide
PQQPFPQTQQ

SEQ ID NO: 1713 - protein, 9 aa, Artificial Sequence
  gluten peptide
QQPQQPFPQ

SEQ ID NO: 1714 - protein, 9 aa, Artificial Sequence
  gluten peptide
QQPQQPYPQ

SEQ ID NO: 1715 - protein, 9 aa, Artificial Sequence
  gluten peptide
PFPQPQQPQ

SEQ ID NO: 1716 - protein, 9 aa, Artificial Sequence
  gluten peptide
PFPQSQQPQ

SEQ ID NO: 1717 - protein, 9 aa, Artificial Sequence
  gluten peptide
PFPQPQQAQ

SEQ ID NO: 1718 - protein, 9 aa, Artificial Sequence
  gluten peptide
QFPQTQQPQ

SEQ ID NO: 1719 - protein, 9 aa, Artificial Sequence
  gluten peptide
PQQQFIQPQ

SEQ ID NO: 1720 - protein, 9 aa, Artificial Sequence
  gluten peptide
QQPQLPFPQ

SEQ ID NO: 1721 - protein, 9 aa, Artificial Sequence
  gluten peptide
LQPQQPFPQ

SEQ ID NO: 1722 - protein, 20 aa, Artificial Sequence
  gluten peptide
PFTQPQQPTPIQPQQPFPQQ

SEQ ID NO: 1723 - protein, 20 aa, Artificial Sequence
  gluten peptide
QQQFIQPQQPFPQQPQQTYP

SEQ ID NO: 1724 - protein, 20 aa, Artificial Sequence
  gluten peptide
PFPQQPQQPFPQQPQQSFPQ

SEQ ID NO: 1725 - protein, 20 aa, Artificial Sequence
  gluten peptide
TPIQPQQPFPQQPQQPQQPF

SEQ ID NO: 1726 - protein, 20 aa, Artificial Sequence
  gluten peptide
QTQQPQQPFPQQPQQPFPQT

SEQ ID NO: 1727 - protein, 20 aa, Artificial Sequence
  gluten peptide
QQFLQPQQPFPQQPQQPYPQ

SEQ ID NO: 1728 - protein, 20 aa, Artificial Sequence
  gluten peptide
PQQPFPQQPQQPQQPFPQPQ

SEQ ID NO: 1729 - protein, 20 aa, Artificial Sequence
  gluten peptide
QQPFPQQPQQPFPQPQQPIP

SEQ ID NO: 1730 - protein, 20 aa, Artificial Sequence
  gluten peptide
PQQPFLQPQQPFPQQPQQPF

SEQ ID NO: 1731 - protein, 20 aa, Artificial Sequence
  gluten peptide
QPFPQPQQPFPWQPQQPFPQ

SEQ ID NO: 1732 - protein, 20 aa, Artificial Sequence
  gluten peptide
QPQQPFPQSQQPQQPFPQPQ

SEQ ID NO: 1733 - protein, 20 aa, Artificial Sequence
  gluten peptide
PQTQQPQQPFPQSQQPQQPF

SEQ ID NO: 1734 - protein, 20 aa, Artificial Sequence
  gluten peptide
SEQIIPQQLQQPFPLQPQQP

SEQ ID NO: 1735 - protein, 20 aa, Artificial Sequence
  gluten peptide
PFPQTQQPQQPFPQLQQPQQ

SEQ ID NO: 1736 - protein, 20 aa, Artificial Sequence
  gluten peptide
QPQQPIPVQPQQSFPQQSQQ

SEQ ID NO: 1737 - protein, 20 aa, Artificial Sequence
  gluten peptide
FPELQQPIPQQPQQPFPLQP

SEQ ID NO: 1738 - protein, 20 aa, Artificial Sequence
  gluten peptide
FPQQPQQPYPQQPQQPFPQT

SEQ ID NO: 1739 - protein, 20 aa, Artificial Sequence
  gluten peptide
PRQPFPQQPQQPYPQQPQQP

SEQ ID NO: 1740 - protein, 20 aa, Artificial Sequence
  gluten peptide
PFPQPQQPQQSFPQQQQPLI

SEQ ID NO: 1741 - protein, 20 aa, Artificial Sequence
  gluten peptide
LPQPQQPQQSFPQQQRPFIQ

SEQ ID NO: 1742 - protein, 20 aa, Artificial Sequence
  gluten peptide
QPQQPQQPFPQQQQPLIQPY

SEQ ID NO: 1743 - protein, 20 aa, Artificial Sequence
  gluten peptide
QPQQQYPSGQGSFQPSQQNP

SEQ ID NO: 1744 - protein, 20 aa, Artificial Sequence
  gluten peptide
QYPSSQGSFQPSQQNPQAQG

SEQ ID NO: 1745 - protein, 20 aa, Artificial Sequence
  gluten peptide
GQGFFQPSQQNPQAQGSFQP

SEQ ID NO: 1746 - protein, 20 aa, Artificial Sequence
  gluten peptide
PQTQQPQQPFPQPQQTFPQQ

SEQ ID NO: 1747 - protein, 20 aa, Artificial Sequence
  gluten peptide
QQPQQPFPQPQLPFPQQSEQ

SEQ ID NO: 1748 - protein, 20 aa, Artificial Sequence
  gluten peptide
FPWQPQQPFPQTQQSFPLQP

SEQ ID NO: 1749 - protein, 20 aa, Artificial Sequence
  gluten peptide
PFPQTQQPQQPFPQLQQPQQ

SEQ ID NO: 1750 - protein, 20 aa, Artificial Sequence
  gluten peptide
QQPLPQPQQPQQPFPQSQQP

SEQ ID NO: 1751 - protein, 20 aa, Artificial Sequence
  gluten peptide
PFPQLQQPQQPFPQPQQQLP

SEQ ID NO: 1752 - protein, 20 aa, Artificial Sequence
  gluten peptide
PRQPFPQQPQQPYPQQPQQP

SEQ ID NO: 1753 - protein, 20 aa, Artificial Sequence
  gluten peptide
PQQPFPQPQQPQQPFPQLQQ

SEQ ID NO: 1754 - protein, 20 aa, Artificial Sequence
  gluten peptide
PQTQQPQQPFPQSQQPQQPF

SEQ ID NO: 1755 - protein, 20 aa, Artificial Sequence
  gluten peptide
QPQQPFPQSQQPQQPFPQPQ

SEQ ID NO: 1756 - protein, 20 aa, Artificial Sequence
  gluten peptide
PQQPQQPFPQPQQAQLPFPQ

SEQ ID NO: 1757 - protein, 20 aa, Artificial Sequence
  gluten peptide
HQPQQQFPQTQQPQQPFPQP

SEQ ID NO: 1758 - protein, 20 aa, Artificial Sequence
  gluten peptide
FSQPQQPQQQFIQPQQPFPQ

SEQ ID NO: 1759 - protein, 20 aa, Artificial Sequence
  gluten peptide
PQPQQPQLPFPQQPQQPFPQ

SEQ ID NO: 1760 - protein, 20 aa, Artificial Sequence
  gluten peptide
PQQQFLQPQQPFPQQPRQPY

SEQ ID NO: 1761 - protein, 20 aa, Artificial Sequence
  gluten peptide
QTLPAMCNVYIPPHCSTTIA

SEQ ID NO: 1762 - protein, 20 aa, Artificial Sequence
  gluten peptide
NPSQQQPQEQVPLVQEQQFQ

SEQ ID NO: 1763 - protein, 20 aa, Artificial Sequence
  gluten peptide
HHFRSNSNHHFHSNNNQFYR

SEQ ID NO: 1764 - protein, 16 aa, Artificial Sequence
  gluten peptide
EQQFGQNIFSGFSVQL

SEQ ID NO: 1765 - protein, 16 aa, Artificial Sequence
  gluten peptide
QLRCPAIHSVVQAIIL

SEQ ID NO: 1766 - protein, 16 aa, Artificial Sequence
  gluten peptide
QYQPYPEQEQPILQQQ

SEQ ID NO: 1767 - protein, 16 aa, Artificial Sequence
  gluten peptide
QIPEQLRCPAIHSVVQ

SEQ ID NO: 1768 - protein, 14 aa, Artificial Sequence
  gluten peptide
EQYQPEQQPFMQPL

SEQ ID NO: 1769 - protein, 20 aa, Artificial Sequence
  gluten peptide
PQQLFPLPQQPFPQPQQPFP

SEQ ID NO: 1770 - protein, 20 aa, Artificial Sequence
  gluten peptide
QPFPQPQQPTPIQPQQPFPQ

SEQ ID NO: 1771 - protein, 20 aa, Artificial Sequence
  gluten peptide
QQPQQLFPQTQQSSPQQPQQ

SEQ ID NO: 1772 - protein, 20 aa, Artificial Sequence
  gluten peptide
PQTQQPQQPFPQPQQPQQLF

SEQ ID NO: 1773 - protein, 20 aa, Artificial Sequence
  gluten peptide
QEQREGVQILLPQSHQQLVG

SEQ ID NO: 1774 - protein, 20 aa, Artificial Sequence
  gluten peptide
FPQQPQQPFPQPQQQLPLQP

SEQ ID NO: 1775 - protein, 20 aa, Artificial Sequence
  gluten peptide
PQQPFPQQPEQIIPQQPQQP

SEQ ID NO: 1776 - protein, 20 aa, Artificial Sequence
  gluten peptide
QQLPLQPQQPFPQPQQPIPQ

SEQ ID NO: 1777 - protein, 20 aa, Artificial Sequence
  gluten peptide
QQPQQPFPLQPQQPVPQQPQ

SEQ ID NO: 1778 - protein, 20 aa, Artificial Sequence
  gluten peptide
SIPQPQQPFPQPQQPFPQSQ

SEQ ID NO: 1779 - protein, 20 aa, Artificial Sequence
  gluten peptide
QTQQSIPQPQQPFPQPQQPF

SEQ ID NO: 1780 - protein, 20 aa, Artificial Sequence
  gluten peptide
NMQVGPSGQVEWPQQQPLPQ

SEQ ID NO: 1781 - protein, 20 aa, Artificial Sequence
  gluten peptide
VGPSGQVSWPQQQPLPQPQQ

SEQ ID NO: 1782 - protein, 20 aa, Artificial Sequence
  gluten peptide
QQPFLLQPQQPFSQPQQPFL

SEQ ID NO: 1783 - protein, 20 aa, Artificial Sequence
  gluten peptide
FPLQPQQPFPQQPEQIISQQ

SEQ ID NO: 1784 - protein, 20 aa, Artificial Sequence
  gluten peptide
PQQPQRPFAQQPEQIISQQP

SEQ ID NO: 1785 - protein, 20 aa, Artificial Sequence
  gluten peptide
SPQQPQLPFPQPQQPFVVVV

SEQ ID NO: 1786 - protein, 20 aa, Artificial Sequence
  gluten peptide
QQPSIQLSLQQQLNPCKNVL

SEQ ID NO: 1787 - protein, 11 aa, Artificial Sequence
  gluten peptide
QQPIPQQPQPY

SEQ ID NO: 1788 - protein, 11 aa, Artificial Sequence
  gluten peptide
PFPQPQQPFPW

SEQ ID NO: 1789 - protein, 9 aa, Artificial Sequence
  gluten peptide
LQPQQPFPQ

SEQ ID NO: 1790 - protein, 9 aa, Artificial Sequence
  gluten peptide
PQPQQASPL

SEQ ID NO: 1791 - protein, 10 aa, Artificial Sequence
  gluten peptide
IIPQQPQQPF

SEQ ID NO: 1792 - protein, 9 aa, Artificial Sequence
  gluten peptide
YPEQPQQPF

SEQ ID NO: 1793 - protein, 20 aa, Artificial Sequence
  gluten peptide
QQQPFPQQPIPQQPQPYPQQ

SEQ ID NO: 1794 - protein, 20 aa, Artificial Sequence
  gluten peptide
QQPQPFSQQPIPQQPQPYPQ

SEQ ID NO: 1795 - protein, 20 aa, Artificial Sequence
  gluten peptide
PQQPVPQQPQPYPQQPQPFP

SEQ ID NO: 1796 - protein, 20 aa, Artificial Sequence
  gluten peptide
PQPFPQQPIPQQPQPYPQQP

SEQ ID NO: 1797 - protein, 20 aa, Artificial Sequence
  gluten peptide
YPQQPQPFPQQPIPQQPQPY

SEQ ID NO: 1798 - protein, 20 aa, Artificial Sequence
  gluten peptide
QPQPYPQQPQPYPQQPFQPQ

SEQ ID NO: 1799 - protein, 20 aa, Artificial Sequence
  gluten peptide
QPQQPQPFPQQPVPQQPQPY

SEQ ID NO: 1800 - protein, 20 aa, Artificial Sequence
  gluten peptide
PQPYPQQPQPFPQQPPFCQQ

SEQ ID NO: 1801 - protein, 20 aa, Artificial Sequence
  gluten peptide
QPFPQPQQPFPWQPQQPFPQ

SEQ ID NO: 1802 - protein, 20 aa, Artificial Sequence
  gluten peptide
PFPQQPQQPFPQPQQPFRQQ

SEQ ID NO: 1803 - protein, 20 aa, Artificial Sequence
  gluten peptide
WQPQQPFPQPQQPFPLQPQQ

SEQ ID NO: 1804 - protein, 20 aa, Artificial Sequence
  gluten peptide
PWQPQQPFPQPQEPIPQQPQ

SEQ ID NO: 1805 - protein, 20 aa, Artificial Sequence
  gluten peptide
QQPFPQPQQPIPYQPQQPFN

SEQ ID NO: 1806 - protein, 20 aa, Artificial Sequence
  gluten peptide
PQQPQQPFPQPQQPFSWQPQ

SEQ ID NO: 1807 - protein, 20 aa, Artificial Sequence
  gluten peptide
QPQQPFPQPQQPIPYQPQQP

SEQ ID NO: 1808 - protein, 20 aa, Artificial Sequence
  gluten peptide
QSQQQFPQPQQPFPQQPQQP

SEQ ID NO: 1809 - protein, 20 aa, Artificial Sequence
  gluten peptide
PFPQPQQPFSWQPQQPFLQP

SEQ ID NO: 1810 - protein, 20 aa, Artificial Sequence
  gluten peptide
FPQPQEPFPQQPQQPFPLQP

SEQ ID NO: 1811 - protein, 20 aa, Artificial Sequence
  gluten peptide
PFPQPQQPFPWQPQQPFPQP

SEQ ID NO: 1812 - protein, 20 aa, Artificial Sequence
  gluten peptide
FPQYQIPTPLQPQQPFPQQP

SEQ ID NO: 1813 - protein, 20 aa, Artificial Sequence
  gluten peptide
FPLQPQQPFPQQPQQPFPQQ

SEQ ID NO: 1814 - protein, 20 aa, Artificial Sequence
  gluten peptide
QQPFPLQPQQPFPQPQPFPQ

SEQ ID NO: 1815 - protein, 20 aa, Artificial Sequence
  gluten peptide
SPLQPQQPFPQGSEQIIPQQ

SEQ ID NO: 1816 - protein, 20 aa, Artificial Sequence
  gluten peptide
PQQASPLQPQPQQASPLQPQ

SEQ ID NO: 1817 - protein, 20 aa, Artificial Sequence
  gluten peptide
PQQPPFWPQQPFPQQPPFGL

SEQ ID NO: 1818 - protein, 20 aa, Artificial Sequence
  gluten peptide
PVLSQQQPCTQDQTPLLQEQ

SEQ ID NO: 1819 - protein, 20 aa, Artificial Sequence
  gluten peptide
RQLPKYIIPQQPQQPFLLQP

SEQ ID NO: 1820 - protein, 20 aa, Artificial Sequence
  gluten peptide
QGSEQIIPQQPQQPFPLQPH

SEQ ID NO: 1821 - protein, 20 aa, Artificial Sequence
  gluten peptide
PQGSEQIIPQQPFPLQPQPF

SEQ ID NO: 1822 - protein, 20 aa, Artificial Sequence
  gluten peptide
QPFPTPQQFFPYLPQQTFPP

SEQ ID NO: 1823 - protein, 20 aa, Artificial Sequence
  gluten peptide
PFPQPPQQKYPEQPQQPFPW

SEQ ID NO: 1824 - protein, 20 aa, Artificial Sequence
  gluten peptide
QKYPEQPQQPFPWQQPTIQL

SEQ ID NO: 1825 - protein, 20 aa, Artificial Sequence
  gluten peptide
FQQPQQSYPVQPQQPFPQPQ

SEQ ID NO: 1826 - protein, 20 aa, Artificial Sequence
  gluten peptide
QIPYVHPSILQQLNPCKVFL

SEQ ID NO: 1827 - protein, 20 aa, Artificial Sequence
  gluten peptide
LAAQLPAMCRLEGGGGLLAS

SEQ ID NO: 1828 - protein, 20 aa, Artificial Sequence
  gluten peptide
PYLPEELSPQYQIPTPLQPQ

SEQ ID NO: 1829 - protein, 20 aa, Artificial Sequence
  gluten peptide
VSPHPGQQTTVSPHQGQQTT

SEQ ID NO: 1830 - protein, 16 aa, Artificial Sequence
  gluten peptide
GQLPYPQPQLPYPQPG

SEQ ID NO: 1831 - protein, 16 aa, Artificial Sequence
  gluten peptide
GLQPFPQPQLPYPQPG

SEQ ID NO: 1832 - protein, 16 aa, Artificial Sequence
  gluten peptide
GLQPFPQPQLPFPQPG

SEQ ID NO: 1833 - protein, 16 aa, Artificial Sequence
  gluten peptide
GLQPFPQPQLPYLQPG

SEQ ID NO: 1834 - protein, 16 aa, Artificial Sequence
  gluten peptide
GLQPFPQPQLPYSQPG

SEQ ID NO: 1835 - protein, 16 aa, Artificial Sequence
  gluten peptide
GLQPFPQPQLSYSQPG

SEQ ID NO: 1836 - protein, 16 aa, Artificial Sequence
  gluten peptide
GQQPFPQPQQPFPWQG

SEQ ID NO: 1837 - protein, 16 aa, Artificial Sequence
  gluten peptide
GQQPFPQPQQPIPVQG

SEQ ID NO: 1838 - protein, 16 aa, Artificial Sequence
  gluten peptide
GQQPFPQPQQPFSQQG

SEQ ID NO: 1839 - protein, 16 aa, Artificial Sequence
  gluten peptide
GQQPFPQPQQPFCQQG

SEQ ID NO: 1840 - protein, 16 aa, Artificial Sequence
  gluten peptide
GGLERPWQQQPLPPQG

SEQ ID NO: 1841 - protein, 16 aa, Artificial Sequence
  gluten peptide
GQTFPHQPQQAFPQPG

SEQ ID NO: 1842 - protein, 16 aa, Artificial Sequence
  gluten peptide
LQQQCSPVAMPQRLAR

SEQ ID NO: 1843 - protein, 16 aa, Artificial Sequence
  gluten peptide
QGQQGYYPISPQQSGQ

SEQ ID NO: 1844 - protein, 16 aa, Artificial Sequence
  gluten peptide
PGQGQSGYYPTSPQQS

SEQ ID NO: 1845 - protein, 16 aa, Artificial Sequence
  gluten peptide
QGQPGYYPTSPQQIGQ

SEQ ID NO: 1846 - protein, 16 aa, Artificial Sequence
  gluten peptide
GQGQSGYYPTSPQQSG

SEQ ID NO: 1847 - protein, 16 aa, Artificial Sequence
  gluten peptide
QQGYYPTSPQQSGQGQ

SEQ ID NO: 1848 - protein, 16 aa, Artificial Sequence
  gluten peptide
QGQQGYYPTSPQQPPQ

SEQ ID NO: 1849 - protein, 16 aa, Artificial Sequence
  gluten peptide
QQGYYPISPQQLGQGQ

SEQ ID NO: 1850 - protein, 16 aa, Artificial Sequence
  gluten peptide
YVPPDCSTINVPYANI

SEQ ID NO: 1851 - protein, 16 aa, Artificial Sequence
  gluten peptide
IIMQQEQQEQRQGVQI

SEQ ID NO: 1852 - protein, 16 aa, Artificial Sequence
  gluten peptide
VAHAIIMHQQQQQQQE

SEQ ID NO: 1853 - protein, 16 aa, Artificial Sequence
  gluten peptide
GQPIPQQPQQPFPLQG

SEQ ID NO: 1854 - protein, 16 aa, Artificial Sequence
  gluten peptide
GFPQLQQPQQPFPQQG

SEQ ID NO: 1855 - protein, 16 aa, Artificial Sequence
  gluten peptide
GFPQTQQPQQPFPQQG

SEQ ID NO: 1856 - protein, 16 aa, Artificial Sequence
  gluten peptide
GQPLSQQPQQTFPQQG

SEQ ID NO: 1857 - protein, 16 aa, Artificial Sequence
  gluten peptide
GQQPQQQPQQPFPQQG

SEQ ID NO: 1858 - protein, 16 aa, Artificial Sequence
  gluten peptide
GFPQPQQPQQPFPQQG

SEQ ID NO: 1859 - protein, 16 aa, Artificial Sequence
  gluten peptide
GFPQPQQPQQSFPQQG

SEQ ID NO: 1860 - protein, 16 aa, Artificial Sequence
  gluten peptide
GQPQQTFPQQPQLPFG

SEQ ID NO: 1861 - protein, 16 aa, Artificial Sequence
  gluten peptide
GMQVDPSGQVQWPQQG

SEQ ID NO: 1862 - protein, 16 aa, Artificial Sequence
  gluten peptide
GIQVDPSGQVQWPQQG

SEQ ID NO: 1863 - protein, 16 aa, Artificial Sequence
  gluten peptide
GMQADPSGQVQWPQQG

SEQ ID NO: 1864 - protein, 16 aa, Artificial Sequence
  gluten peptide
GMQVDPSSQVQWPQQG

SEQ ID NO: 1865 - protein, 16 aa, Artificial Sequence
  gluten peptide
GQQEQQILQQILQQQG

SEQ ID NO: 1866 - protein, 16 aa, Artificial Sequence
  gluten peptide
VPLYRTTTSVPFGVGT

SEQ ID NO: 1867 - protein, 16 aa, Artificial Sequence
  gluten peptide
LQTLPSMCNVYIPPYC

SEQ ID NO: 1868 - protein, 16 aa, Artificial Sequence
  gluten peptide
LALQTLPAMCNVYIPP

SEQ ID NO: 1869 - protein, 16 aa, Artificial Sequence
  gluten peptide
DAIRAIIYSIVLQEQQ

SEQ ID NO: 1870 - protein, 16 aa, Artificial Sequence
  gluten peptide
GQQQFSQPQQQFPQPG

SEQ ID NO: 1871 - protein, 16 aa, Artificial Sequence
  gluten peptide
GFFPQPQQQFPQPQQG

SEQ ID NO: 1872 - protein, 16 aa, Artificial Sequence
  gluten peptide
GFPQQPQQQFPQPQQG

SEQ ID NO: 1873 - protein, 16 aa, Artificial Sequence
  gluten peptide
GQQPFPQPQQQFPQPG

SEQ ID NO: 1874 - protein, 16 aa, Artificial Sequence
  gluten peptide
GQPQPFLPQLPYPQPG

SEQ ID NO: 1875 - protein, 16 aa, Artificial Sequence
  gluten peptide
GQQPFPQPQQQLPQPG

SEQ ID NO: 1876 - protein, 16 aa, Artificial Sequence
  gluten peptide
GLPFPQQPQQPLPQPG

SEQ ID NO: 1877 - protein, 16 aa, Artificial Sequence
  gluten peptide
GQQAFPQPQQTFPHQG

SEQ ID NO: 1878 - protein, 16 aa, Artificial Sequence
  gluten peptide
GQQPFTQPQQPTPIQG

SEQ ID NO: 1879 - protein, 16 aa, Artificial Sequence
  gluten peptide
GQQIFPQPQQTFPHQG

SEQ ID NO: 1880 - protein, 16 aa, Artificial Sequence
  gluten peptide
GQQQFIQPQQPFPQQG

SEQ ID NO: 1881 - protein, 16 aa, Artificial Sequence
  gluten peptide
GQPFPLQPQQPFPQQG

SEQ ID NO: 1882 - protein, 16 aa, Artificial Sequence
  gluten peptide
GQPFPWQPQQPFPQQG

SEQ ID NO: 1883 - protein, 16 aa, Artificial Sequence
  gluten peptide
GQPTPIQPQQPFPQQG

SEQ ID NO: 1884 - protein, 16 aa, Artificial Sequence
  gluten peptide
GQVSFQQPQQQYPSPG

SEQ ID NO: 1885 - protein, 16 aa, Artificial Sequence
  gluten peptide
GFFQQPQQQYPSSQQG

SEQ ID NO: 1886 - protein, 16 aa, Artificial Sequence
  gluten peptide
GGKSQVLQQSTYQLLG

SEQ ID NO: 1887 - protein, 16 aa, Artificial Sequence
  gluten peptide
GQVVNNHGQTVFNDIG

SEQ ID NO: 1888 - protein, 16 aa, Artificial Sequence
  gluten peptide
GQPQLPFPQQPQQQFG

SEQ ID NO: 1889 - protein, 16 aa, Artificial Sequence
  gluten peptide
GQPFPQPQQAQLPFPG

SEQ ID NO: 1890 - protein, 16 aa, Artificial Sequence
  gluten peptide
GHQQPGQRQQGYYPTG

SEQ ID NO: 1891 - protein, 16 aa, Artificial Sequence
  gluten peptide
GHQQFPQQQIPVVQPG

SEQ ID NO: 1892 - protein, 16 aa, Artificial Sequence
  gluten peptide
LEAVTSIALRTLPTMC

SEQ ID NO: 1893 - protein, 16 aa, Artificial Sequence
  gluten peptide
GQQPQFSQQQQIPVIG

SEQ ID NO: 1894 - protein, 11 aa, Artificial Sequence
  gluten peptide
PFPQPQQPFPW

SEQ ID NO: 1895 - protein, 12 aa, Artificial Sequence
  gluten peptide
PFPQQPQQPFPQ

SEQ ID NO: 1896 - protein, 13 aa, Artificial Sequence
  gluten peptide
PQPFLPQLPYPQP

SEQ ID NO: 1897 - protein, 12 aa, Artificial Sequence
  gluten peptide
QPFPQPQQPQQP

SEQ ID NO: 1898 - protein, 15 aa, Artificial Sequence
  gluten peptide
SGQGVSQSQQQSQQQ

SEQ ID NO: 1899 - protein, 16 aa, Artificial Sequence
  gluten peptide
QYEVIRSLVLRTLPNM

SEQ ID NO: 1900 - protein, 16 aa, Artificial Sequence
  gluten peptide
GLARSQMLQQSICHVG

SEQ ID NO: 1901 - protein, 16 aa, Artificial Sequence
  gluten peptide
RTTTSVPFGVGTGVGA

SEQ ID NO: 1902 - protein, 16 aa, Artificial Sequence
  gluten peptide
AIHTVIHSIIMQQEQQ

SEQ ID NO: 1903 - protein, 17 aa, Artificial Sequence
  gluten peptide
QLQPFPQPELPYPQPQL

SEQ ID NO: 1904 - protein, 17 aa, Artificial Sequence
  gluten peptide
QPEQPFPQPEQPFPWQP

SEQ ID NO: 1905 - protein, 35 aa, Artificial Sequence
  gluten peptide
QLQPFPQPELPYPQPFPQQPEQPFPQPEQPFPWQP

SEQ ID NO: 1906 - protein, 9 aa, Artificial Sequence
  gluten peptide
QGSFQPSQQ

SEQ ID NO: 1907 - protein, 16 aa, Artificial Sequence
  gluten peptide
VYIPPYCTIAPFGIFG

SEQ ID NO: 1908 - protein, 16 aa, Artificial Sequence
  gluten peptide
AMCNVYIPPYCAMAPF

SEQ ID NO: 1909 - protein, 9 aa, Artificial Sequence
  gluten peptide
ZQPTPIQPZ

SEQ ID NO: 1910 - protein, 9 aa, Artificial Sequence
  gluten peptide
ZQPFPLQPZ

SEQ ID NO: 1911 - protein, 9 aa, Artificial Sequence
  gluten peptide
ZQPIPVQPZ

SEQ ID NO: 1912 - protein, 9 aa, Artificial Sequence
  gluten peptide
ZQPQQPFPZ

SEQ ID NO: 1913 - protein, 9 aa, Artificial Sequence
  gluten peptide
ZQPZLPFPZ

SEQ ID NO: 1914 - protein, 9 aa, Artificial Sequence
  gluten peptide
ZGSFQPSQZ

SEQ ID NO: 1915 - protein, 9 aa, Artificial Sequence
  gluten peptide
ZLPFPZQPZ

SEQ ID NO: 1916 - protein, 9 aa, Artificial Sequence
  gluten peptide
ZQPFPZQPZ

SEQ ID NO: 1917 - protein, 12 aa, Artificial Sequence
  gluten peptide
PQQQQQQLVQQQ

SEQ ID NO: 1918 - protein, 15 aa, Artificial Sequence
  gluten peptide
  misc_feature (9)..(9): X is L or Q
  misc_feature (11)..(11): X is A or S
QGIFLQPHXIXQLEV

SEQ ID NO: 1919 - protein, 10 aa, Artificial Sequence
  gluten peptide
  misc_feature (9)..(9): X is H or Y
QPGQGQQGXY

SEQ ID NO: 1920 - protein, 13 aa, Artificial Sequence
  gluten peptide
  misc_feature (12)..(12): X is F or Y
QSRYEAIRAIIXS

SEQ ID NO: 1921 - protein, 9 aa, Artificial Sequence
  gluten peptide
RTTTSVPFD

SEQ ID NO: 1922 - protein, 9 aa, Artificial Sequence
  gluten peptide
QPPFWRQQP

SEQ ID NO: 1923 - protein, 9 aa, Artificial Sequence
  gluten peptide
  misc_feature (2)..(3): X is P or S
  misc_feature (4)..(4): X is F or I
  misc_feature (5)..(5): X is P or S
QXXXXQQQQ

SEQ ID NO: 1924 - protein, 9 aa, Artificial Sequence
  gluten peptide
  misc_feature (1)..(1): X is Q or P or L or R
XGYYPTSPQ

SEQ ID NO: 1925 - protein, 12 aa, Artificial Sequence
  gluten peptide
QGSYYPGQASPQ

SEQ ID NO: 1926 - protein, 20 aa, Artificial Sequence
  gluten peptide
GYYPTSSLQPEQGQQGYYPT

SEQ ID NO: 1927 - protein, 20 aa, Artificial Sequence
  gluten peptide
QGQQLAQGQQGQQPAQVQQG

SEQ ID NO: 1928 - protein, 266 aa, Artificial Sequence
  A-gliadin
VRVPVPQLQPQNPSQQQPQEQVPLVQQQQFPGQQQQFPPQQPYPQPQPFPSQQPYLQLQPFPQPQLPYPQPQSFPPQQPYPQPQPQYSQPQQPISQQQAQQQQQQQQQQQQQQILQQILQQQLIPCMDVVLQQHNIAHARSQVLQQSTYQLLQELCCQHLWQIPEQSQCQAIHNVVHAIILHQQQKQQQQPSSQVSFQQPLQQYPLGQGSFRPSQQNPQAQGSVQPQQLPQFEEIRNLALQTLPAMCNVYIAPYCTIAPFGIFGTN
